(19) United States
(12) Patent Application Publication
(10) Pub. No.: US 2022/0380770 A1
(43) Pub. Date: Dec. 1, 2022

(54) SHORT INTERFERING NUCLEIC ACID (siNA) MOLECULES AND USES THEREOF FOR CORONAVIRUS DISEASES

(71) Applicant: ALIGOS THERAPEUTICS, INC., South San Francisco, CA (US)

(72) Inventors: Leonid BEIGELMAN, San Mateo, CA (US); Antitsa STOYCHEVA, South San Francisco, CA (US); Aneerban BHATTACHARYA, South San Francisco, CA (US); David Bernard SMITH, South San Francisco, CA (US); Rajendra K. PANDEY, Foster City, CA (US); Saul Martinez MONTERO, San Bruno, CA (US); Vivek Kumar RAJWANSHI, Cupertino, CA (US); Jin HONG, Pacifica, CA (US)

(73) Assignee: ALIGOS THERAPEUTICS, INC., South San Francisco, CA (US)

(21) Appl. No.: 17/226,686

(22) Filed: Apr. 9, 2021

Related U.S. Application Data
(60) Provisional application No. 63/008,273, filed on Apr. 10, 2020.

(51) Int. Cl. C12N 15/113; A61K 31/713; A61P 31/14

(52) U.S. Cl. CPC C12N 15/1131; A61K 31/713; A61P 31/14; C12N 2310/14; C12N 2310/321; C12N 2310/346; C12N 2310/315; C12N 2310/313; C12N 2310/317; C12N 2310/345; C12N 2310/322

(57) ABSTRACT

The present invention is in the field of pharmaceutical compounds and preparations and method of their use in the treatment of disease. Described are short interfering nucleic acid (siNA) molecules comprising modified nucleotides, compositions containing the same, and uses thereof for treating or preventing coronavirus infections. In particular, the present invention is in the field of siNA molecules effective against a broad spectrum of coronaviruses, and especially the β-coronaviruses, including SARS-CoV-2, the causative agent of COVID-19.

### CROSS-REFERENCE STATEMENT

[0001] This application claims priority to U.S. Provisional Application No. 63/008,273, filed Apr. 10, 2020, the disclosure of which is hereby incorporated by reference in its entirety.

### FIELD OF THE INVENTION

[0002] The present invention is in the field of pharmaceutical compounds and preparations and method of their use in the treatment of disease. Described are short interfering nucleic acid (siNA) molecules comprising modified nucleotides, compositions containing the same, and uses thereof for treating or preventing coronavirus infections. In particular, the present invention is in the field of siNA molecules effective against a broad spectrum of coronaviruses, and especially the β-coronaviruses, including SARS-CoV-2, the causative agent of COVID-19.

### BACKGROUND

[0003] The following discussion is merely provided to aid the reader in understanding the disclosure and is not admitted to describe or constitute prior art thereto.

[0004] Coronavirus disease 2019 (COVID-19) (also referred to as novel coronavirus pneumonia or 2019-nCoV acute respiratory disease) is an infectious disease caused by the virus severe respiratory syndrome coronavirus 2 (SARS-CoV-2) (also referred to as novel coronavirus 2019, or 2019-nCoV). The disease was first identified in December 2019 and spread globally, causing a pandemic. Symptoms of COVID-19 include fever, cough, shortness of breath, fatigue, headache, loss of smell, nasal congestion, sore throat, coughing up sputum, pain in muscles or joints, chills, nausea, vomiting, and diarrhea. In severe cases, symptoms can include difficulty waking, confusion, blueish face or lips, coughing up blood, decreased white blood cell count, and kidney failure. Complications can include pneumonia, viral sepsis, acute respiratory distress syndrome, and kidney failure.

[0005] COVID-19 is especially threatening to public health. The virus is highly contagious, and studies currently indicate that it can be spread by asymptomatic carriers or by those who are pre-symptomatic. Likewise, the early stage of the disease is slow-progressing enough that carriers do not often realize they are infected, leading them to expose numerous others to the virus. The combination of COVID-19's ease of transmission, its high rate of hospitalization of victims, and its death rate make the virus a substantial public health risk, especially for countries without a healthcare system equipped to provide supportive care to pandemic-level numbers of patients. There is not yet a vaccine or specific antiviral treatment for COVID-19 and accordingly, there is a pressing need for treatments or cures.

[0006] SARS-CoV-2 is not the only coronavirus that causes disease. It is a β-coronavirus, a genus of coronaviruses that includes other human pathogens, including SARS-CoV (the causative agent of SARS), MERS-CoV (the causative agent of MERS), and HCoV-OC43 (a causative agent of the common cold). The infectivity of these viruses, and the severity of the diseases they cause, varies widely. B-coronaviruses can also manifest as zoonotic infections, spread to and from humans and animals. Additionally, non-human species such as camels, bats, tigers, non-human primates, and rabbits can be susceptible to β-coronaviruses. Accordingly, there is a pressing need for treatments or cures to multiple coronaviruses.

[0007] RNA interference (RNAi) is a biological response to double-stranded RNA that mediates resistance to both endogenous parasitic and exogenous pathogenic nucleic acids, and regulates the expression of protein-coding genes. The short interfering nucleic acids (siNA), such as siRNA, have been developed for RNAi therapy to treat a variety of diseases. For instance, RNAi therapy has been proposed for the treatment of metabolic diseases, neurodegenerative diseases, cancer, and pathogenic infections (See e.g., Rondindone, Biotechniques, 2018, 40(4S), doi.org/10.2144/000112163, Boudreau and Davidson, Curr Top Dev Biol, 2006, 75:73-92, Chalbatani et al., Int J Nanomedicine, 2019, 14:3111-3128, Arbuthnot, Drug News Perspect, 2010, 23(6):341-50, and Chernikov et. al., Front. Pharmacol., 2019, doi.org/10.3389/fphar.2019.00444, each of which are incorporated by reference in their entirety).

[0008] The present disclosure provides siNA molecules useful against coronaviruses, and especially SARS-CoV-2, the causative agent of COVID-19. Accordingly, the present disclosure fulfills the need in the art for compounds that can be safely and effectively treat or prevent coronavirus infections in humans.

### SUMMARY OF THE INVENTION

[0009] Disclosed herein are short interfering nucleic acid (siNA) molecules, which can be used to treat and/or prevent viral disease and infections, such as diseases (e.g., COVID-19) or infections caused by coronavirus like SARS-CoV-2. In some embodiments, the siNA can be a double-stranded siNA (ds-siNA).

[0010] In one aspect, the present disclosure provides siNA that comprise (a) a sense strand comprising a first nucleotide sequence, wherein the first nucleotide sequence is 15 to 30 nucleotides in length and comprises a nucleotide sequence that is at least about 60%, 65%, 70%, 75%, 80%, 85%, 90%, 95%, or 100% identical to an RNA corresponding to of any one of SEQ ID NOs: 1-1203 and 2411-3392; and (b) an antisense strand comprising a second nucleotide sequence, wherein the second nucleotide sequence is 15 to 30 nucleotides in length and comprises a nucleotide sequence that is at least about 60%, 65%, 70%, 75%, 80%, 85%, 90%, 95%, or 100% complementary to the first nucleotide sequence.

[0011] In another aspect, the present disclosure provides siNA that comprise a sense strand comprises (a) a first nucleotide sequence, wherein the first nucleotide sequence is identical to an RNA corresponding to 15 to 30 nucleotides within positions 190-216, 233-279, 288-324, 455-477, 626-651, 704-723, 3352-3378, 5384-5403, 6406-6483, 7532-7551, 9588-9606, 10484-10509, 11609-11630, 11834-11853, 12023-12045, 12212-12234, 12401-12420, 12839-12867, 12885-12924, 12966-12990, 13151-13176, 13363-13386, 13388-13416, 13458-13416, 13458-13520, 13762-13790, 14290-14312, 14404-14429, 14500-14531, 14623-14642, 14650-14687, 14698-14717, 14722-14748, 14750-14777, 14821-14846, 14854-14873, 14875-14903, 14962-14990, 14992-15020, 15055-15140, 15172-15200, 15310-15332, 15346-15367, 15496-15518, 15622-15644, 15838-15869, 15886-15905, 15985-16010, 16057-16079, 16186-16205, 16430-16448, 16822-16865, 16954-16976, 17008-17042, 17080-17111, 17137-17156, 17269-17289, 17530-17549, 17563-17582, 17680-17699, 17746-17765, 17857-17876, 17956-17975, 18100-18122, 18196-18218, 19618-19639, 19783-19802, 19831-19850, 20107-20130, 20776-20795, 21502-21524, 24302-24325, 24446-24465, 24620-24651, 24662-24684, 25034-25057, 25104-25128, 25364-25387, 25502-25530, 26191-26227, 26232-26267, 26269-26330, 26332-26394, 26450-26481, 26574-26600, 27003-27064, 27093-27111, 27183-27212, 27382-27407, 27511-27533, 27771-27818, 28270-28296, 28397-28434, 28513-28546, 28673-28692, 28706-28726, 28744-28794, 28799-28827, 28946-28972, 28976-29034, 29144-29172, 29174-29196, 29228-29259, 29285-29305, 29342-29394, 29444-29463, 29543-29566, 29598-29630, 29652-29687, 29689-29731, 29733-29757, or 29770-29828 of SEQ ID NO: 2407 and (b) an antisense strand.

[0012] In another aspect, the present disclosure provides siNA that comprise an antisense strand comprising (a) a second nucleotide sequence, wherein the second nucleotide sequence is complementary to an RNA corresponding to 15 to 30 nucleotides within positions 190-216, 233-279, 288-324, 455-477, 626-651, 704-723, 3352-3378, 5384-5403, 6406-6483, 7532-7551, 9588-9606, 10484-10509, 11609-11630, 11834-11853, 12023-12045, 12212-12234, 12401-12420, 12839-12867, 12885-12924, 12966-12990, 13151-13176, 13363-13386, 13388-13416, 13458-13416, 13458-13520, 13762-13790, 14290-14312, 14404-14429, 14500-14531, 14623-14642, 14650-14687, 14698-14717, 14722-14748, 14750-14777, 14821-14846, 14854-14873, 14875-14903, 14962-14990, 14992-15020, 15055-15140, 15172-15200, 15310-15332, 15346-15367, 15496-15518, 15622-15644, 15838-15869, 15886-15905, 15985-16010, 16057-16079, 16186-16205, 16430-16448, 16822-16865, 16954-16976, 17008-17042, 17080-17111, 17137-17156, 17269-17289, 17530-17549, 17563-17582, 17680-17699, 17746-17765, 17857-17876, 17956-17975, 18100-18122, 18196-18218, 19618-19639, 19783-19802, 19831-19850, 20107-20130, 20776-20795, 21502-21524, 24302-24325, 24446-24465, 24620-24651, 24662-24684, 25034-25057, 25104-25128, 25364-25387, 25502-25530, 26191-26227, 26232-26267, 26269-26330, 26332-26394, 26450-26481, 26574-26600, 27003-27064, 27093-27111, 27183-27212, 27382-27407, 27511-27533, 27771-27818, 28270-28296, 28397-28434, 28513-28546, 28673-28692, 28706-28726, 28744-28794, 28799-28827, 28946-28972, 28976-29034, 29144-29172, 29174-29196, 29228-29259, 29285-29305, 29342-29394, 29444-29463, 29543-29566, 29598-29630, 29652-29687, 29689-29731, 29733-29757, or 29770-29828 of SEQ ID NO: 2407 and (b) a sense strand.

[0013] In another aspect, the present disclosure provides siNA that comprise (a) a sense strand comprising a nucleotide sequence identical to an RNA corresponding to any one of SEQ ID NOs: 1-1203 and 2411-3392 and (b) an antisense strand.

[0014] In another aspect, the present disclosure provides siNA that comprise (a) an antisense strand comprising a nucleotide sequence identical to an RNA corresponding to any one of SEQ ID NOs: 1204-2406 and 3393-4374 and (b) a sense strand.

[0015] In some embodiments, the sense strand can comprise 15 or more modified nucleotides independently selected from a 2′-O-methyl nucleotide and a 2′-fluoro nucleotide, wherein at least one modified nucleotide is a 2′-O-methyl nucleotide and the nucleotide at position 3, 5, 7, 8, 9, 10, 11, 12, 14, 17, and/or 19 from the 5′ end is a 2′-fluoro nucleotide; and the antisense strand can comprise 15 or more modified nucleotides independently selected from a 2′-O-methyl nucleotide and a 2′-fluoro nucleotide, wherein at least one modified nucleotide is a 2′-O-methyl nucleotide and at least one modified nucleotide is a 2′-fluoro nucleotide.

[0016] In some embodiments, the sense strand can comprise 15 or more modified nucleotides independently selected from a 2′-O-methyl nucleotide and a 2′-fluoro nucleotide, wherein at least one modified nucleotide is a 2′-O-methyl nucleotide and at least one modified nucleotide is a 2′-fluoro nucleotide; and the antisense strand can comprise 15 or more modified nucleotides independently selected from a 2′-O-methyl nucleotide and a 2′-fluoro nucleotide, wherein at least one modified nucleotide is a 2′-O-methyl nucleotide and the nucleotide at position 2, 5, 6, 8, 10, 14, 16, 17, and/or 18 from the 5′ end is a 2′-fluoro nucleotide.

[0017] In some embodiments, the sense strand can comprise 16, 17, 18, 19, 20, 21, 22, 23, or more modified nucleotides independently selected from a 2′-O-methyl nucleotide and a 2′-fluoro nucleotide. In some embodiments, 70%, 75%, 80%, 85%, 90%, 95% or 100% of the nucleotides in the sense strand can be modified nucleotides independently selected from a 2′-O-methyl nucleotide and a 2′-fluoro nucleotide.

[0018] In some embodiments, (i) at least 2, 3, 4, 5, or 6 modified nucleotides of the sense strand are 2′-fluoro nucleotides; (ii) no more than 10, 9, 8, 7, 6, 5, 4, 3, or 2 modified nucleotides of the sense strand are 2′-fluoro nucleotides; (iii) at least 10, 11, 12, 13, 14, 15, 16, 17, 18, 19, 20, 21, or 22 modified nucleotides of the sense strand sequence are 2′-O-methyl nucleotides; and/or (iv) no more than 25, 24, 23, 22, 21, 20, 19, 18, 17, 16, 15, 14, 13, 12, 11, 10, 9, 8, 7, 6, 5, 4, 3, or 2 modified nucleotides of the sense strand are 2′-O-methyl nucleotides.

[0019] In some embodiments, the antisense strand can comprise 16, 17, 18, 19, 20, 21, 22, 23, or more modified nucleotides independently selected from a 2′-O-methyl nucleotide and a 2′-fluoro nucleotide. In some embodiments, 70%, 75%, 80%, 85%, 90%, 95% or 100% of the nucleotides in the antisense strand are modified nucleotides independently selected from a 2′-O-methyl nucleotide and a 2′-fluoro nucleotide.

[0020] In some embodiments, (i) at least 2, 3, 4, 5, or 6 modified nucleotides of the antisense strand are 2′-fluoro nucleotides; (ii) no more than 10, 9, 8, 7, 6, 5, 4, 3, or 2 modified nucleotides of the antisense strand are 2′-fluoro nucleotides; (iii) at least 10, 11, 12, 13, 14, 15, 16, 17, 18, 19, 20, 21, or 22 modified nucleotides of the antisense strand sequence are 2′-O-methyl nucleotides; and/or (iv) no more than 25, 24, 23, 22, 21, 20, 19, 18, 17, 16, 15, 14, 13, 12, 11, 10, 9, 8, 7, 6, 5, 4, 3, or 2 modified nucleotides of the antisense strand are 2′-O-methyl nucleotides.

[0021] In some embodiments, the sense strand and/or the antisense strand can comprise one or more phosphorothioate internucleoside linkage(s). In some embodiments, the siNA can further comprise a phosphorylation blocker and/or a 5′-stabilized end cap.

[0022] In some embodiments, the sense strand can further comprise a TT sequence adjacent to the first nucleotide sequence.

[0023] In some embodiments, at least one end of the siNA can be a blunt end. In some embodiments, at least one end of the siNA can comprise an overhang, wherein the overhang comprises at least one nucleotide. In some embodiments, both ends of the siNA can comprise an overhang, wherein the overhang comprises at least one nucleotide.

[0024] In some embodiments, the sense strand can further comprise at least 1, 2, 3, 4, 5, 6, 7, 8, 9, 10, 11, 12, 13, 14, 15 or more phosphorothioate internucleotide linkages. In some embodiments, the antisense strand can further comprise at least 1, 2, 3, 4, 5, 6, 7, 8, 9, 10, 11, 12, 13, 14, 15 or more phosphorothioate internucleotide linkages.

[0025] In some embodiments, the sense strand and/or the antisense strand can comprise one or more modified nucleotides. In some embodiments, the modified nucleotides are independently selected from 2′-O-methyl nucleotides and 2′-fluoro nucleotides. In some embodiments, at least one 2′-fluoro nucleotide or 2′-O-methyl nucleotide is a 2′-fluoro or 2′-O-methyl nucleotide mimic of Formula (V):

[chemical structure]

wherein R¹ is a nucleobase, aryl, heteroaryl, or H, Q¹ and Q² are independently S or O, R⁵ is —OCD₃, —F, or —OCH₃, and R⁶ and R⁷ are independently H or D.

[0026] In some embodiments, the sense strand and/or antisense strand comprises at least one modified nucleotide selected from

[chemical structure]

where R is H or alkyl (or AmNA(N-Me)) when R is alkyl);

[chemical structure]

wherein B is a nucleobase.

[0027] In some embodiments, the siNA can further comprise a phosphorylation blocker and/or a 5′-stabilized end cap. In some embodiments, the phosphorylation blocker has the structure of Formula (IV):

[chemical structure]

wherein R¹ is a nucleobase, R⁴ is —O—R³⁰ or —NR³¹R³², R³⁰ is C₁-C₈ substituted or unsubstituted alkyl; and
R³¹ and R³² together with the nitrogen to which they are attached form a substituted or unsubstituted heterocyclic ring. In some embodiments, R⁴ is —OCH₃ or —N(CH₂CH₂)₂O. In some embodiments, the phosphorylation blocker is attached to the 5′ end of the sense strand. In some embodiments, the phosphorylation blocker is attached to the 5′ end of the sense strand via one or more linkers independently selected from a phosphodiester linker, phosphorothioate linker, and phosphorodithioate linker.

[0028] In some embodiments, the 5′-stabilized end cap is a 5′ vinylphosphonate. In some embodiments, the 5′ vinylphosphonate is selected from a 5′-(E)-vinyl phosphonate or 5′-(Z)-vinyl phosphonate. In some embodiments, the 5′-vinylphosphonate is a deuterated vinyl phosphonate. In some embodiments, the deuterated vinylphosphonate is a mono-deuterated vinylphosphonate or a di-deuterated vinylphosphonate

[0029] In some embodiments, the 5′-stabilized end cap has the structure of Formula (Ia):

[chemical structure]

wherein R¹ is a nucleobase, aryl, heteroaryl, or H; R² is

[chemical structure]

—CH═CD-Z, —CD=CH—Z, —CD=CD-Z, —(CR²¹R²²)ₙ—Z or —(C₂-C₆ alkenylene)-Z and R²⁰ is hydrogen, or R² and R²⁰ together form a 3- to 7-membered carbocyclic ring substituted with —(CR²¹R²²)ₙ—Z or —(C₂-C₆ alkenylene)-Z; n is 1, 2, 3, or 4;
Z is —ONR²³R²⁴, —OP(O)OH(CH₂)ₘCO₂R²³, —OP(S)OH(CH₂)ₘCO₂R²³, —P(O)(OH)₂, —P(O)(OH)(OCH₃), —P(O)(OH)(OCD₃), —SO₂(CH₂)ₘP(O)(OH)₂, —SO₂NR²³R²⁵, —NR²³R²⁴, or —NR²³SO₂R²⁵; R²¹ and R²² either are independently hydrogen or C₁-C₆ alkyl, or R²¹ and R²² together form an oxo group; R²³ is hydrogen or C₁-C₆ alkyl, R²⁴ is —SO₂R²⁵ or —C(O)R²⁵, or R²³ and R²⁴ together with the nitrogen to which they are attached form a substituted or unsubstituted heterocyclic ring; R²⁵ is C₁-C₆ alkyl; and m is 1, 2, 3, or 4. In some embodiments, R¹ is an aryl. In some embodiments, the aryl is a phenyl.

[0030] In some embodiments, the 5′-stabilized end cap has the structure of Formula (Ib):

[chemical structure]

wherein
R¹ is a nucleobase, aryl, heteroaryl, or H,

### R² is

[chemical structure]

—CH═CD-Z, —CD=CH—Z, —CD=CD-Z, —(CR²¹R²²)ₙ—Z, or —(C₂-C₆ alkenylene)-Z and R²⁰ is hydrogen; or
R² and R²⁰ together form a 3- to 7-membered carbocyclic ring substituted with —(CR²¹R²²)ₙ—Z or —(C₂-C₆ alkenylene)-Z;
n is 1, 2, 3, or 4;
Z is —ONR²³R²⁴, —OP(O)OH(CH₂)ₘCO₂R²³, —OP(S)OH(CH₂)ₘCO₂R²³, —P(O)(OH)₂, —P(O)(OH)(OCH₃), —P(O)(OH)(OCD₃), —SO₂(CH₂)ₘP(O)(OH)₂, —SO₂NR²³R²⁵, —NR²³R²⁴,
R²¹ and R²² are independently hydrogen or C₁-C₆ alkyl; R²¹ and R²² together form an oxo group;
R²³ is hydrogen or C₁-C₆ alkyl;
R²⁴ is —SO₂R²⁵ or —C(O)R²⁵; or
R²³ and R²⁴ together with the nitrogen to which they are attached form a substituted or unsubstituted heterocyclic ring;
R²⁵ is C₁-C₆ alkyl; and
m is 1, 2, 3, or 4.

[0032] In some embodiments, the 5′-stabilized end cap is selected from the group consisting of Formula (1) to Formula (15), Formula (9X) to Formula (12X), and Formula (9Y) to Formula (12Y):

[chemical structure]

[chemical structure]

[chemical structure]

[chemical structure]

wherein R¹ is a nucleobase, aryl, heteroaryl, or H.

[0033] In some embodiments, the 5′-stabilized end cap is selected from the group consisting of Formulas (1A)-(15A), Formulas (9B)-(12B), Formulas (9AX)-(12AX), Formulas (9AY)-(12AY), Formulas (9BX)-(12BX), and Formulas (9BY)-(12BY):

[chemical structure]

[chemical structure]

[chemical structure]

[chemical structure]

[chemical structure]

[chemical structure]

[0034] In some embodiments, the 5′-stabilized end cap can be attached to the 5′ end of the antisense strand. In some embodiments, the 5′-stabilized end cap can be attached to the 5′ end of the antisense strand via one or more linkers independently selected from a phosphodiester linker, phosphorothioate linker, phosphoramidite (HEG) linker, triethylene glycol (TEG) linker, or phosphorodithioate linker.

[0035] In some embodiments, the sense strand consists of 21 nucleotides. In some embodiments, 2′-O-methyl nucleotides are at positions 18-21 from the 5′ end of the sense strand.

[0036] In some embodiments, the antisense strand consists of 23 nucleotides. In some embodiments, 2′-O-methyl nucleotides are at positions 18-23 from the 5′ end of the antisense strand.

[0037] In another aspect, the present disclosure provides, a siNA selected from ds-siNA-005; ds-siNA-006; ds-siNA-007; ds-siNA-008; ds-siNA-009; ds-siNA-010; ds-siNA-011; ds-siNA-012; ds-siNA-013; ds-siNA-014; ds-siNA-015; ds-siNA-016; ds-siNA-017; ds-siNA-018; ds-siNA-019; ds-siNA-020; ds-siNA-021; ds-siNA-022; ds-siNA-023; ds-siNA-024; ds-siNA-025; ds-siNA-026; ds-siNA-027; ds-siNA-028; ds-siNA-029; ds-siNA-030; ds-siNA-031; ds-siNA-032; ds-siNA-033; ds-siNA-034; ds-siNA-035; ds-siNA-036; ds-siNA-037; ds-siNA-038; ds-siNA-039; ds-siNA-040; ds-siNA-041; ds-siNA-042; ds-siNA-043; ds-siNA-044; ds-siNA-045; ds-siNA-046; ds-siNA-047; ds-siNA-048; ds-siNA-049; ds-siNA-050; ds-siNA-051; ds-siNA-052; ds-siNA-053; ds-siNA-054; ds-siNA-055; ds-siNA-056; ds-siNA-057; ds-siNA-058; ds-siNA-059; ds-siNA-060; ds-siNA-061; ds-siNA-062; ds-siNA-063; ds-siNA-064; ds-siNA-065; ds-siNA-066; ds-siNA-067; ds-siNA-068; ds-siNA-069; ds-siNA-070; ds-siNA-071; ds-siNA-072; ds-siNA-073; ds-siNA-074; ds-siNA-075; ds-siNA-076; ds-siNA-077; ds-siNA-078; ds-siNA-079; ds-siNA-080; ds-siNA-081; ds-siNA-082; ds-siNA-083; ds-siNA-084; ds-siNA-085; ds-siNA-086; ds-siNA-087; ds-siNA-088; ds-siNA-089; ds-siNA-090; ds-siNA-091; ds-siNA-092; ds-siNA-093; ds-siNA-094; ds-siNA-095; ds-siNA-096; ds-siNA-097; ds-siNA-098; ds-siNA-099; ds-siNA-100; ds-siNA-101; ds-siNA-102; ds-siNA-103; ds-siNA-104; ds-siNA-105; ds-siNA-106; ds-siNA-107; ds-siNA-108; ds-siNA-109; ds-siNA-110; ds-siNA-111; ds-siNA-112; ds-siNA-113; ds-siNA-114; ds-siNA-115; ds-siNA-116; ds-siNA-117; ds-siNA-118; ds-siNA-119; ds-siNA-120; ds-siNA-121; ds-siNA-122; ds-siNA-123; ds-siNA-124; ds-siNA-125; ds-siNA-126; ds-siNA-127; ds-siNA-128; ds-siNA-129; ds-siNA-130; ds-siNA-131; ds-siNA-132; ds-siNA-133; ds-siNA-134; ds-siNA-135; ds-siNA-136; ds-siNA-137; ds-siNA-138; ds-siNA-139; ds-siNA-140; ds-siNA-141; ds-siNA-142; ds-siNA-143; ds-siNA-144; ds-siNA-145; ds-siNA-146; ds-siNA-147; ds-siNA-148; ds-siNA-149; ds-siNA-150; ds-siNA-151; ds-siNA-152; ds-siNA-153; ds-siNA-154; ds-siNA-155; ds-siNA-156; ds-siNA-157; ds-siNA-158; ds-siNA-159; ds-siNA-160; ds-siNA-161; ds-siNA-162; ds-siNA-163; ds-siNA-164; ds-siNA-165; ds-siNA-166; ds-siNA-167; ds-siNA-168; ds-siNA-169; ds-siNA-170; ds-siNA-171; ds-siNA-172; ds-siNA-173; ds-siNA-174; ds-siNA-175; ds-siNA-176; ds-siNA-177; ds-siNA-178; ds-siNA-179; ds-siNA-180; ds-siNA-181; ds-siNA-182; ds-siNA-183; ds-siNA-184; ds-siNA-185; ds-siNA-186; ds-siNA-187; ds-siNA-188; ds-siNA-189; ds-siNA-190; ds-siNA-191; ds-siNA-192; ds-siNA-193; ds-siNA-194; ds-siNA-195; ds-siNA-196; ds-siNA-197; ds-siNA-198; ds-siNA-199; ds-siNA-200; ds-siNA-201; ds-siNA-202; ds-siNA-203; ds-siNA-204; ds-siNA-205; ds-siNA-206; ds-siNA-207; ds-siNA-208; ds-siNA-209; ds-siNA-210; ds-siNA-211; ds-siNA-212; ds-siNA-213; ds-siNA-214; ds-siNA-215; ds-siNA-216; ds-siNA-217; ds-siNA-218; ds-siNA-219; ds-siNA-220; ds-siNA-221; and ds-siNA-222.

[0038] In some embodiments, the siNA is selected from ds-siNA-196 (sense and antisense respectively comprising SEQ ID NOs: 4578 and 4800), ds-siNA-197 (sense and antisense respectively comprising SEQ ID NOs: 4579 and 4801), ds-siNA-198 (sense and antisense respectively comprising SEQ ID NOs: 4580 and 4802), ds-siNA-199 (sense and antisense respectively comprising SEQ ID NOs: 4581 and 4803), ds-siNA-217 (sense and antisense respectively comprising SEQ ID NOs: 4599 and 4821), ds-siNA-218 (sense and antisense respectively comprising SEQ ID NOs: 4600 and 4822), ds-siNA-219 (sense and antisense respectively comprising SEQ ID NOs: 4601 and 4823), ds-siNA-220 (sense and antisense respectively comprising SEQ ID NOs: 4602 and 4824), ds-siNA-221 (sense and antisense respectively comprising SEQ ID NOs: 4603 and 4825), and ds-siNA-222 (sense and antisense respectively comprising SEQ ID NOs: 4604 and 4826).

[0039] In some embodiments, the siNA is selected from ds-siNA-196 (sense and antisense respectively comprising SEQ ID NOs: 4578 and 4800), ds-siNA-197 (sense and antisense respectively comprising SEQ ID NOs: 4579 and 4801), ds-siNA-198 (sense and antisense respectively comprising SEQ ID NOs: 4580 and 4802), and ds-siNA-199 (sense and antisense respectively comprising SEQ ID NOs: 4581 and 4803).

[0040] In some embodiments, the siNA is selected from, ds-siNA-217 (sense and antisense respectively comprising SEQ ID NOs: 4599 and 4821), ds-siNA-218 (sense and antisense respectively comprising SEQ ID NOs: 4600 and 4822), ds-siNA-219 (sense and antisense respectively comprising SEQ ID NOs: 4601 and 4823), ds-siNA-220 (sense and antisense respectively comprising SEQ ID NOs: 4602 and 4824), ds-siNA-221 (sense and antisense respectively comprising SEQ ID NOs: 4603 and 4825), and ds-siNA-222 (sense and antisense respectively comprising SEQ ID NOs: 4604 and 4826).

[0041] In another aspect, the present disclosure provides pharmaceutical compositions comprising at least one siNA according to any one of the embodiments described herein and a pharmaceutically acceptable carrier or diluent.

[0042] In some embodiments, the pharmaceutical composition can comprise two or more siNA according to any of the embodiments described herein.

[0043] In another aspect, the present disclosure provides methods for treating a disease in a subject in need thereof, comprising administering the subject a pharmaceutical composition according to any of the embodiments described herein.

[0044] In another aspect, the present disclosure provides uses of a ds-siRNA according to any of the embodiments described herein in the manufacture of a medicament for treating a disease.

[0045] In another aspect, the present disclosure provides methods for treating a disease in a subject in need thereof, comprising administering the subject a siNA according to any of the embodiments described herein. In some embodiments, wherein the disease is a viral disease. In some embodiments, the viral disease is caused by an RNA virus. In some embodiments, the RNA virus is a single-stranded RNA virus (ssRNA virus). In some embodiments, the ssRNA virus is a positive-sense single-stranded RNA virus ((+)ssRNA virus). In some embodiments, the (+)ssRNA virus is a coronavirus. In some embodiments, the coronavirus is a β-coronavirus. In some embodiments, the β-coronavirus is severe acute respiratory syndrome coronavirus 2 (SARS-CoV-2) (also known by the provisional name 2019 novel coronavirus, or 2019-nCoV), human coronavirus OC43 (hCoV-OC43), Middle East respiratory syndrome-related coronavirus (MERS-CoV, also known by the provisional name 2012 novel coronavirus, or 2012-nCoV), or severe acute respiratory syndrome-related coronavirus (SARS-CoV, also known as SARS-CoV-1). In some embodiments, the β-coronavirus is SARS-CoV-2. In some embodiments, the (3-coronavirus is SARS-CoV. In some embodiments, the β-coronavirus is MERS-CoV. In some embodiments, the β-coronavirus is hCoV-OC43.

[0046] In some embodiments, the disease is a respiratory disease. In some embodiments, the respiratory disease is viral pneumonia. In some embodiments, the respiratory disease is an acute respiratory infection. In some embodiments, the respiratory disease is a cold. In some embodiments, the respiratory disease is severe acute respiratory syndrome (SARS). In some embodiments, the respiratory disease is Middle East respiratory syndrome (MERS). In some embodiments, the disease is coronavirus disease 2019 (COVID-19). In some embodiments, the respiratory disease causes one or more symptoms selected from coughing, sore throat, runny nose, sneezing, headache, fever, shortness of breath, myalgia, abdominal pain, fatigue, difficulty breathing, persistent chest pain or pressure, difficulty waking, loss of smell and taste, muscle or joint pain, chills, nausea or vomiting, nasal congestion, diarrhea, haemoptysis, conjunctival congestion, sputum production, chest tightness, and palpitations. In some embodiments, the respiratory disease can cause complications selected from sinusitis, otitis media, pneumonia, acute respiratory distress syndrome, disseminated intravascular coagulation, pericarditis, and kidney failure. In some embodiments, the respiratory disease is idiopathic.

[0047] In another aspect, the present disclosure provides methods of treating a β-coronavirus-caused disease in a subject in need thereof, comprising administering the subject a siNA comprising a sense strand that is 15 to 30 nucleotides in length, wherein the sense strand is at least about 60%, 65%, 70%, 75%, 80%, 85%, 90%, 95%, or 100% identical to a sequence within a region of either two, three, or four of SEQ ID NOs: 2407, 2408, 2409, and 2410. In some embodiments, the sense strand is identical to an RNA sequence corresponding to a region of each of SEQ ID NOs: 2407, 2408, 2409, and 2410. In some embodiments, the sense strand is selected from the group consisting of sequences corresponding to SEQ ID NOs: 1-1203 and 2411-3392.

[0048] In another aspect, the present disclosure provides methods of treating a β-coronavirus-caused disease in a subject in need thereof, comprising administering the subject a siNA comprising antisense strand that is 15 to 30 nucleotides in length, wherein the antisense strand is complementary to a sequence within a region of either two, three, or four of SEQ ID NOs: 2407, 2408, 2409, and 2410. In some embodiments, the second nucleotide sequence is at least about 60%, 65%, 70%, 75%, 80%, 85%, 90%, 95%, or 100% complementary to an RNA sequence corresponding to a region of each of SEQ ID NOs: 2407, 2408, 2409, and 2410. In some embodiments, the antisense strand comprises a sequence corresponding to one of SEQ ID NOs: 1204-2406 and 3393-4374.

[0049] In another aspect, the present disclosure provides methods of treating a β-coronavirus-caused disease in a subject in need thereof, comprising administering the subject a siNA comprising a sense strand that is 15 to 30 nucleotides in length, wherein the sense strand is at least about 60%, 65%, 70%, 75%, 80%, 85%, 90%, 95%, or 100% identical to a sequence within a region of either two, three, or four of the genomes of severe acute respiratory syndrome coronavirus 2 (SARS-CoV-2), human coronavirus OC43 (hCoV-OC43), Middle East respiratory syndrome-related coronavirus (MERS-CoV), and severe acute respiratory syndrome-related coronavirus (SARS-CoV). In some embodiments, the sense strand is identical to a sequence within a region of each of the genomes of severe acute respiratory syndrome coronavirus 2 (SARS-CoV-2), human coronavirus OC43 (hCoV-OC43), Middle East respiratory syndrome-related coronavirus (MERS-CoV), and severe acute respiratory syndrome-related coronavirus (SARS-CoV).

[0050] In another aspect, the present disclosure provides methods of treating a β-coronavirus-caused disease in a subject in need thereof, comprising administering the subject a siNA comprising an antisense strand that is 15 to 30 nucleotides in length, wherein the antisense strand is at least about 60%, 65%, 70%, 75%, 80%, 85%, 90%, 95%, or 100% complementary to a sequence within a region of either two, three, or four of the genomes of severe acute respiratory syndrome coronavirus 2 (SARS-CoV-2), human coronavirus OC43 (hCoV-OC43), Middle East respiratory syndrome-related coronavirus (MERS-CoV), and severe acute respiratory syndrome-related coronavirus (SARS-CoV). In some embodiments, the second nucleotide sequence is complementary to a sequence within a region of each of the genomes of severe acute respiratory syndrome coronavirus 2 (SARS-CoV-2), human coronavirus OC43 (hCoV-OC43), Middle East respiratory syndrome-related coronavirus (MERS-CoV), and severe acute respiratory syndrome-related coronavirus (SARS-CoV).

[0051] A method of treating a β-coronavirus-caused disease in a subject in need thereof, comprising administering the subject a siNA selected from ds-siNA-005; ds-siNA-006; ds-siNA-007; ds-siNA-008; ds-siNA-009; ds-siNA-010; ds-siNA-011; ds-siNA-012; ds-siNA-013; ds-siNA-014; ds-siNA-015; ds-siNA-016; ds-siNA-017; ds-siNA-018; ds-siNA-019; ds-siNA-020; ds-siNA-021; ds-siNA-022; ds-siNA-023; ds-siNA-024; ds-siNA-025; ds-siNA-026; ds-siNA-027; ds-siNA-028; ds-siNA-029; ds-siNA-030; ds-siNA-031; ds-siNA-032; ds-siNA-033; ds-siNA-034; ds-siNA-035; ds-siNA-036; ds-siNA-037; ds-siNA-038; ds-siNA-039; ds-siNA-040; ds-siNA-041; ds-siNA-042; ds-siNA-043; ds-siNA-044; ds-siNA-045; ds-siNA-046; ds-siNA-047; ds-siNA-048; ds-siNA-049; ds-siNA-050; ds-siNA-051; ds-siNA-052; ds-siNA-053; ds-siNA-054; ds-siNA-055; ds-siNA-056; ds-siNA-057; ds-siNA-058; ds-siNA-059; ds-siNA-060; ds-siNA-061; ds-siNA-062; ds-siNA-063; ds-siNA-064; ds-siNA-065; ds-siNA-066; ds-siNA-067; ds-siNA-068; ds-siNA-069; ds-siNA-070; ds-siNA-071; ds-siNA-072; ds-siNA-073; ds-siNA-074; ds-siNA-075; ds-siNA-076; ds-siNA-077; ds-siNA-078; ds-siNA-079; ds-siNA-080; ds-siNA-081; ds-siNA-082; ds-siNA-083; ds-siNA-084; ds-siNA-085; ds-siNA-086; ds-siNA-087; ds-siNA-088; ds-siNA-089; ds-siNA-090; ds-siNA-091; ds-siNA-092; ds-siNA-093; ds-siNA-094; ds-siNA-095; ds-siNA-096; ds-siNA-097; ds-siNA-098; ds-siNA-099; ds-siNA-100; ds-siNA-101; ds-siNA-102; ds-siNA-103; ds-siNA-104; ds-siNA-105; ds-siNA-106; ds-siNA-107; ds-siNA-108; ds-siNA-109; ds-siNA-110; ds-siNA-111; ds-siNA-112; ds-siNA-113; ds-siNA-114; ds-siNA-115; ds-siNA-116; ds-siNA-117; ds-siNA-118; ds-siNA-119; ds-siNA-120; ds-siNA-121; ds-siNA-122; ds-siNA-123; ds-siNA-124; ds-siNA-125; ds-siNA-126; ds-siNA-127; ds-siNA-128; ds-siNA-129; ds-siNA-130; ds-siNA-131; ds-siNA-132; ds-siNA-133; ds-siNA-134; ds-siNA-135; ds-siNA-136; ds-siNA-137; ds-siNA-138; ds-siNA-139; ds-siNA-140; ds-siNA-141; ds-siNA-142; ds-siNA-143; ds-siNA-144; ds-siNA-145; ds-siNA-146; ds-siNA-147; ds-siNA-148; ds-siNA-149; ds-siNA-150; ds-siNA-151; ds-siNA-152; ds-siNA-153; ds-siNA-154; ds-siNA-155; ds-siNA-156; ds-siNA-157; ds-siNA-158; ds-siNA-159; ds-siNA-160; ds-siNA-161; ds-siNA-162; ds-siNA-163; ds-siNA-164; ds-siNA-165; ds-siNA-166; ds-siNA-167; ds-siNA-168; ds-siNA-169; ds-siNA-170; ds-siNA-171; ds-siNA-172; ds-siNA-173; ds-siNA-174; ds-siNA-175; ds-siNA-176; ds-siNA-177; ds-siNA-178; ds-siNA-179; ds-siNA-180; ds-siNA-181; ds-siNA-182; ds-siNA-183; ds-siNA-184; ds-siNA-185; ds-siNA-186; ds-siNA-187; ds-siNA-188; ds-siNA-189; ds-siNA-190; ds-siNA-191; ds-siNA-192; ds-siNA-193; ds-siNA-194; ds-siNA-195; ds-siNA-196; ds-siNA-197; ds-siNA-198; ds-siNA-199; ds-siNA-200; ds-siNA-201; ds-siNA-202; ds-siNA-203; ds-siNA-204; ds-siNA-205; ds-siNA-206; ds-siNA-207; ds-siNA-208; ds-siNA-209; ds-siNA-210; ds-siNA-211; ds-siNA-212; ds-siNA-213; ds-siNA-214; ds-siNA-215; ds-siNA-216; ds-siNA-217; ds-siNA-218; ds-siNA-219; ds-siNA-220; ds-siNA-221; and ds-siNA-222. In some embodiments, the siNA is selected from ds-siNA-196 (sense and antisense respectively comprising SEQ ID NOs: 4578 and 4800), ds-siNA-197 (sense and antisense respectively comprising SEQ ID NOs: 4579 and 4801), ds-siNA-198 (sense and antisense respectively comprising SEQ ID NOs: 4580 and 4802), ds-siNA-199 (sense and antisense respectively comprising SEQ ID NOs: 4581 and 4803), ds-siNA-217 (sense and antisense respectively comprising SEQ ID NOs: 4599 and 4821), ds-siNA-218 (sense and antisense respectively comprising SEQ ID NOs: 4600 and 4822), ds-siNA-219 (sense and antisense respectively comprising SEQ ID NOs: 4601 and 4823), ds-siNA-220 (sense and antisense respectively comprising SEQ ID NOs: 4602 and 4824), ds-siNA-221 (sense and antisense respectively comprising SEQ ID NOs: 4603 and 4825), and ds-siNA-222 (sense and antisense respectively comprising SEQ ID NOs: 4604 and 4826). In some embodiments, the siNA is selected from ds-siNA-196 (sense and antisense respectively comprising SEQ ID NOs: 4578 and 4800), ds-siNA-197 (sense and antisense respectively comprising SEQ ID NOs: 4579 and 4801), ds-siNA-198 (sense and antisense respectively comprising SEQ ID NOs: 4580 and 4802), and ds-siNA-199 (sense and antisense respectively comprising SEQ ID NOs: 4581 and 4803). In some embodiments, the siNA is selected from, ds-siNA-217 (sense and antisense respectively comprising SEQ ID NOs: 4599 and 4821), ds-siNA-218 (sense and antisense respectively comprising SEQ ID NOs: 4600 and 4822), ds-siNA-219 (sense and antisense respectively comprising SEQ ID NOs: 4601 and 4823), ds-siNA-220 (sense and antisense respectively comprising SEQ ID NOs: 4602 and 4824), ds-siNA-221 (sense and antisense respectively comprising SEQ ID NOs: 4603 and 4825), and ds-siNA-222 (sense and antisense respectively comprising SEQ ID NOs: 4604 and 4826). In some embodiments, the (3-coronavirus can be SARS-CoV-2. In some embodiments, the β-coronavirus-caused disease can be COVID-19.

[0052] In some embodiments of the disclosed methods and uses, the subject is a mammal. In some embodiments, the subject is a human. In some embodiments, the subject is a non-human primate. In some embodiments, the subject is a cat. In some embodiments, the subject is a camel.

[0053] In some embodiments of the disclosed methods and uses, the siNA is administered intravenously, subcutaneously, or via inhalation.

[0054] In some embodiments of the disclosed methods and uses, the subject has been treated with one or more additional coronavirus treatment agents. In some embodiments of the disclosed methods, the subject is concurrently treated with one or more additional coronavirus treatment agents.

[0055] The foregoing general description and following detailed description are exemplary and explanatory and are intended to provide further explanation of the disclosure as claimed. Other objects, advantages, and novel features will be readily apparent to those skilled in the art from the following brief description of the drawings and detailed description of the disclosure.

### BRIEF DESCRIPTION OF THE DRAWINGS

[0056] FIG. 1 (FIG. 1) shows the coronaviridae family and its four genera (top panel) and the full length genome of NCBI 407 (bottom panel), which encodes 28 proteins across multiple open reading frames (ORF s).

[0057] FIG. 2 (FIG. 2) shows the percent identity between multiple coronavirus, including sudden acute respiratory syndrome coronavirus (SARS-CoV), Middle East respiratory syndrome coronavirus (MERS-CoV), and human coronavirus OC43 (top panel), and an alignment of the highly similar region of the genomes encodings non-structural protein 8 (nsp8) to non-structural protein (nsp15) (bottom panel).

[0058] FIG. 3 (FIG. 3) shows details of nsp8-nsp15.

[0059] FIG. 4 (FIG. 4) shows an exemplary siNA molecule.

[0060] FIG. 5 (FIG. 5) shows an exemplary siNA molecule.

[0061] FIGS. 6A-6I (FIGS. 6A-6I) show exemplary double-stranded siNA molecules.

### DETAILED DESCRIPTION

[0062] Disclosed herein are short interfering nucleic acid (siNA) molecules. In some embodiments, the siNA is a double-stranded siNA (ds-siNA). In some embodiments, the ds-siNA comprises a sense strand and an antisense strand. In some embodiments, the ds-siNA comprises (a) a sense strand comprising a first nucleotide sequence, wherein the first nucleotide sequence is 15 to 30 nucleotides in length; and (b) an antisense strand comprising a second nucleotide sequence, wherein the second nucleotide sequence is 15 to 30 nucleotides in length and comprises a nucleotide sequence that is the reverse complement of the first nucleotide sequence.

[0063] Further disclosed herein are pharmaceutical compositions comprising the ds-siNA according to any one of the embodiments described herein and a pharmaceutically acceptable carrier or diluent. In some embodiments the disclosed compositions may comprise two or more ds-siNA according to any of the embodiments described herein.

[0064] Further disclosed herein is a method for treating a disease in a subject in need thereof, comprising administering the subject one or more siNA or pharmaceutical compositions of any of the embodiments described herein. In some embodiments, the disease is a viral infection, such as a coronavirus infection (e.g., COVID-19).

[0065] Further disclosed herein is the use of one or more ds-siRNA according to any of the embodiments described herein in the manufacture of a medicament for treating a disease, such as a viral infection or, more specifically, a coronavirus infection (e.g., COVID-19).

[0066] Further disclosed herein is a method for treating a disease in a subject in need thereof, comprising administering the subject one or more ds-siNA or pharmaceutical compositions of any of the embodiments described herein.

[0067] Further disclosed herein is a method of treating a β-coronavirus-caused disease (e.g., COVID-19) in a subject in need thereof, comprising administering the subject one or more ds-siNA according to any of the embodiments described herein.

[0068] As described in more detail below, the disclose siNA molecules may comprise modified nucleotides. The modified nucleotides may be selected from 2′-O-methyl nucleotides and 2′-fluoro nucleotides. The siNA molecules described herein may comprise 1, 2, 3, 4, 5, 6, 7, 8, 9, or 10 or more phosphorothioate internucleoside linkages. The siNA molecules described herein may comprise at least one phosphorylation blocker. The siNA molecules described herein may comprise a 5′-stabilized end cap. The siNA molecules described herein may comprise one or more blunt ends. The siNA molecules described herein may comprise one or more overhangs.

[0069] Further, the disclosed siNA molecules may comprise (a) a phosphorylation blocker; and (b) a siNA. The siNA may comprise at least 5 nucleotides. The nucleotides may be modified nucleotides, non-modified nucleotides, or any combination thereof. The nucleotides may be ribonucleotides, deoxyribonucleotides, or any combination thereof. The siNA may be single-stranded. Alternatively, the siNA is double-stranded. The double-stranded siNA may comprise one or more blunt ends. The double-stranded siNA may comprise one or more overhangs. The double-stranded siNA may comprise a blunt end and an overhang.

[0070] Further, the disclosed siNA molecules may comprise (a) a conjugated moiety; and (b) a siNA. The siNA may comprise at least 5 nucleotides. The nucleotides may be modified nucleotides, non-modified nucleotides, or any combination thereof. The nucleotides may be ribonucleotides, deoxyribonucleotides, or any combination thereof. The siNA may be single-stranded. Alternatively, the siNA is double-stranded. The double-stranded siNA may comprise one or more blunt ends. The double-stranded siNA may comprise one or more overhangs. The double-stranded siNA may comprise a blunt end and an overhang.

[0071] Further, the disclosed siNA molecules may comprise (a) a 5′-stabilized end cap; and (b) a siNA. The siNA may comprise at least 5 nucleotides. The nucleotides may be modified nucleotides, non-modified nucleotides, or any combination thereof. The nucleotides may be ribonucleotides, deoxyribonucleotides, or any combination thereof. The siNA may be single-stranded. Alternatively, the siNA is double-stranded. The double-stranded siNA may comprise one or more blunt ends. The double-stranded siNA may comprise one or more overhangs. The double-stranded siNA may comprise a blunt end and an overhang.

[0072] Further, the disclosed siNA molecules may comprise (a) at least one phosphorylation blocker, conjugated moiety, or 5′-stabilized end cap; and (b) a siNA. The siNA may comprise at least 5 nucleotides. The nucleotides may be modified nucleotides, non-modified nucleotides, or any combination thereof. The nucleotides may be ribonucleotides, deoxyribonucleotides, or any combination thereof. The siNA may be single-stranded. Alternatively, the siNA is double-stranded. The double-stranded siNA may comprise one or more blunt ends. The double-stranded siNA may comprise one or more overhangs. The double-stranded siNA may comprise a blunt end and an overhang.

[0073] Exemplary siNA, which may be used to treat and/or prevent coronavirus infections (e.g., COVID-19) are also described herein.

### Definitions

[0074] It is to be understood that methods are not limited to the particular embodiments described, and as such may vary. It is also to be understood that the terminology used herein is for the purpose of describing particular embodiments only and is not intended to be limiting. The scope of the present technology will be limited only by the appended claims.

[0075] Unless defined otherwise, all technical and scientific terms used herein have the same meaning as commonly understood by one of ordinary skill in the art to which this invention belongs. Although any methods and materials similar or equivalent to those described herein can also be used in the practice or testing of the present invention, representative illustrative methods and materials are now described.

[0076] Where a range of values is provided, it is understood that each intervening value, to the tenth of the unit of the lower limit unless the context clearly dictates otherwise, between the upper and lower limit of that range and any other stated or intervening value in that stated range, is encompassed within the invention. The upper and lower limits of these smaller ranges may independently be included in the smaller ranges and are also encompassed within the invention, subject to any specifically excluded limit in the stated range. Where the stated range includes one or both of the limits, ranges excluding either or both of those included limits are also included in the invention.

[0077] As used in the specification and claims, the singular form “a,” “an” and “the” include singular and plural references unless the context clearly dictates otherwise.

[0078] As used herein, the term “comprising” is intended to mean that the compositions and methods include the recited elements, but not excluding others. “Consisting essentially of” when used to define compositions and methods, shall mean excluding other elements of any essential significance to the composition or method. “Consisting of” shall mean excluding more than trace elements of other ingredients for claimed compositions and substantial method steps. Embodiments defined by each of these transition terms are within the scope of this disclosure. Accordingly, it is intended that the methods and compositions can include additional steps and components (comprising) or alternatively including steps and compositions of no significance (consisting essentially of) or alternatively, intending only the stated method steps or compositions (consisting of).

[0079] As used herein, “about” means plus or minus 10% as well as the specified number. For example, “about 10” should be understood as both “10” and “9-11.”

[0080] As used herein, “optional” or “optionally” means that the subsequently described event or circumstance may or may not occur, and that the description includes instances where said event or circumstance occurs and instances where it does not.

[0081] The terms “individual,” “subject,” and “patient” are used interchangeably herein, and refer to any individual mammal, e.g., bovine, canine, feline, equine, simian, porcine, camelid, bat, or human, being treated according to the disclosed methods or uses. In preferred embodiments, the subject is a human.

[0082] As used herein, the phrases “effective amount,” “therapeutically effective amount,” and “therapeutic level” mean the siNA dosage or concentration in a subject that provides the specific pharmacological effect for which the siNA is administered in a subject in need of such treatment, i.e. to treat or prevent a coronavirus infection (e.g., MERS, SARS, or COVID-19). It is emphasized that a therapeutically effective amount or therapeutic level of an siNA will not always be effective in treating the infections described herein, even though such dosage is deemed to be a therapeutically effective amount by those of skill in the art. For convenience only, exemplary dosages, drug delivery amounts, therapeutically effective amounts, and therapeutic levels are provided below. Those skilled in the art can adjust such amounts in accordance with standard practices as needed to treat a specific subject and/or condition. The therapeutically effective amount may vary based on the route of administration and dosage form, the age and weight of the subject, and/or the subject's condition, including the type and severity of the coronavirus infection.

[0083] The terms “treatment” or “treating” as used herein with reference to a coronavirus infections refer to reducing or eliminating viral load and/or improving or ameliorating one or more symptoms of an infection such as cough, shortness of breath, body aches, chills, and/or fever.

[0084] The terms “prevent” or “preventing” as used herein with reference to a coronavirus infections refer to precluding an infection from developing in a subject exposed to a coronavirus and/or avoiding the development of one or more symptoms of an infection such as cough, shortness of breath, body aches, chills, and/or fever. “Prevention” may occur when the viral load is never allowed to exceed beyond a threshold level at which point the subject begins to feel sick or exhibit symptoms. “Prevention” may also, in some embodiments, refer to the prevention of a subsequent infection once an initial infection has been treated or cured.

[0085] As used herein, the term “pharmaceutical composition” refers to the combination of an active agent with a carrier, inert or active, making the composition especially suitable for diagnostic or therapeutic use in vivo or ex vivo.

[0086] As used herein, the term “pharmaceutically acceptable carrier” refers to any of the standard pharmaceutical carriers, such as a phosphate buffered saline solution, water, emulsions (e.g., such as an oil/water or water/oil emulsions), and various types of wetting agents. The compositions also can include stabilizers and preservatives. For examples of carriers, stabilizers and adjuvants, see, for example, Martin, Remington's Pharmaceutical Sciences, 15th Ed., Mack Publ. Co., Easton, Pa. [1975].

[0087] The phrases “parenteral administration” and “administered parenterally” as used herein means modes of administration other than enteral and topical administration, usually by injection, and includes, without limitation, intravenous, intramuscular, intraarterial, intrathecal, intracapsular, intraorbital, intracardiac, intradermal, intraperitoneal, transtracheal, subcutaneous, subcuticular, intraarticular, subcapsular, subarachnoid, intraspinal and intrasternal injection and infusion.

[0088] The phrases “systemic administration,” “administered systemically,” “peripheral administration” and “administered peripherally” as used herein mean the administration of a compound, drug or other material other than directly into the central nervous system, such that it enters the patient's system and, thus, is subject to metabolism and other like processes, for example, subcutaneous administration.

[0089] As used herein, the term “nucleobase” refers to a nitrogen-containing biological compound that forms a nucleoside. Examples of nucleobases include, but are not limited to, thymine, uracil, adenine, cytosine, guanine, aryl, heteroaryl, and an analogue or derivative thereof.

[0090] The target gene may be any gene in a cell or virus. Here, “target gene” and “target sequence” are used synonymously.

[0091] For the purposes of the present disclosure, a DNA sequence that replaces all the U residues of an RNA sequence with T residues is “identical” to the RNA sequence, and vice versa. Accordingly, a sequence that is “identical to an RNA corresponding to” a DNA sequence constitutes the DNA sequence with all T replaced by U. The presence of modified nucleotides or 2′-deoxynucleotides in a sequence does not make a sequence not “identical to an RNA” but rather a modified RNA.

[0092] As used herein, “modified nucleotide” includes any nucleic acid or nucleic acid analogue residue that contains a modification or substitution in the chemical structure of an unmodified nucleotide base, sugar (including, but not limited to, 2′-substitution), or phosphate (including, but not limited to, alternate internucleotide linkers, such as phosphorothioates or the substitution of bridging oxygens in phosphate linkers with bridging sulfurs), or a combination thereof. Non-limiting examples of modified nucleotides are shown herein.

[0093] As used herein, the term “d2vd3 nucleotide” refers to a nucleotide comprising a 5′-stabilized end cap of Formula (10):

[chemical structure]

[0094] Throughout the description, where compositions are described as having, including, or comprising specific components, or where processes and methods are described as having, including, or comprising specific steps, it is contemplated that, additionally, there are compositions of the present disclosure that consist essentially of, or consist of, the recited components, and that there are processes and methods according to the present disclosure that consist essentially of, or consist of, the recited processing steps.

[0095] As a general matter, compositions specifying a percentage are by weight unless otherwise specified. Further, if a variable is not accompanied by a definition, then the previous definition of the variable controls.

### Coronaviruses and Coronavirus Infections

[0096] The siNA molecules and compositions described herein may be administered to a subject to treat a disease. Further disclosed herein are uses of any of the siNA molecules or compositions disclosed herein in the manufacture of a medicament for treating a disease.

[0097] In some embodiments of the disclosed method and uses, the disease being treated is a viral disease. In some embodiments, the viral disease is caused by an RNA virus. In some embodiments, the RNA virus is a single-stranded RNA virus (ssRNA virus). In some embodiments, the ssRNA virus is a positive-sense single-stranded RNA virus ((+)ssRNA virus). In some embodiments, the (+)ssRNA virus is a coronavirus.

[0098] Coronaviruses are a family of viruses (i.e., the coronaviridae family) that cause respiratory infections in mammals and that comprise a genome that is roughly 30 kilobases in length. The coronaviridae family is divided into four genera and the genome encodes 28 proteins across multiple open reading frames, including 16 non-structural proteins (nsp) that are post-translationally cleaved from a polyprotein (see FIG. 1).

[0099] The coronaviridae family includes both α-coronaviruses or β-coronaviruses, which both mainly infect bats, but can also infect other mammals like humans, camels, and rabbits. β-coronaviruses have, to date, been of greater clinical importance, having caused epidemics including severe acute respiratory syndrome (SARS), Middle East respiratory syndrome (MERS), and COVID-19. Other disease-causing β-coronaviruses include OC44, and HKU1. Non-limiting examples of disease-causing α-coronaviruses include, but are not limited to, 229E and NL63.

[0100] In some embodiments, the coronavirus is a β-coronaviruses. In some embodiments, the β-coronaviruses is selected from the group consisting of severe acute respiratory syndrome coronavirus 2 (SARS-CoV-2) (also known by the provisional name 2019 novel coronavirus, or 2019-nCoV), human coronavirus OC43 (hCoV-OC43), Middle East respiratory syndrome-related coronavirus (MERS-CoV, also known by the provisional name 2012 novel coronavirus, or 2012-nCoV), and severe acute respiratory syndrome-related coronavirus (SARS-CoV, also known as SARS-CoV-1). In some embodiments, the β-coronaviruses is SARS-CoV-2, the causative agent of COVID-19.

[0101] As shown in FIGS. 2 and 3, several disease-causing coronaviruses share a high degree of homology in the regions of the genome encoding non-structural proteins (nsp), and more specifically, in the region encoding nsp8-nsp15. Indeed, there is roughly 65% identity across the roughly 7 kB sequence of β-coronaviruses from about nucleotide 12900 to about nucleotide 19900 of 2019-nCoV, and some subsections of the genomic span of nsp8 to nsp15 may comprise 95% or more identity. All of the genes in this region encode non-structural proteins associated with replication. Accordingly, this segment of the genome is suitable for targeting with an siNA that can provide a broad spectrum treatment for multiple different types of coronavirus, such as MERS-CoV, SARS-CoV-1, and SARS-CoV-2.

[0102] Without wishing to be bound by theory, upon entry into a cell, any of the ds-siNA molecules disclosed herein may interact with proteins in the cell to form a RNA-Induced Silencing Complex (RISC). Once the ds-siNA is part of the RISC, the ds-siNA may be unwound to form a single-stranded siNA (ss-siNA). The ss-siNA may comprise the antisense strand of the ds-siNA. The antisense strand may bind to a complementary messenger RNA (mRNA), which results in silencing of the gene that encodes the mRNA.

[0103] In some embodiments, the target gene is a viral gene. In some embodiments, the viral gene is from an RNA virus. In some embodiments, the RNA virus is a single-stranded RNA virus (ssRNA virus). In some embodiments, the ssRNA virus is a positive-sense single-stranded RNA virus ((+)ssRNA virus). In some embodiments, the (+)ssRNA virus is a coronavirus. In some embodiments, the coronavirus is a β-coronavirus. In some embodiments, the β-coronavirus is severe acute respiratory syndrome coronavirus 2 (SARS-CoV-2) (also known by the provisional name 2019 novel coronavirus, or 2019-nCoV), human coronavirus OC43 (hCoV-OC43), Middle East respiratory syndrome-related coronavirus (MERS-CoV, also known by the provisional name 2012 novel coronavirus, or 2012-nCoV), severe acute respiratory syndrome-related coronavirus (SARS-CoV, also known as SARS-CoV-1). In some embodiments, the β-coronavirus is SARS-CoV-2.

[0104] In some embodiments, the target gene is selected from genome of SARS-CoV-2. In some embodiments, SARS-CoV-2 has a genome sequence shown in the nucleotide sequence of SEQ ID NO: 2407, which corresponds to the nucleotide sequence of GenBank Accession No. NC_045512.2, which is incorporated by reference in its entirety.

[0105] In some embodiments, the target gene is selected from genome of SARS-CoV. In some embodiments, SARS-CoV has a genome sequence shown in the nucleotide sequence of SEQ ID NO: 2408, which corresponds to the nucleotide sequence of GenBank Accession No. NC_004718.3, which is incorporated by reference in its entirety.

[0106] In some embodiments, the target gene is selected from the genome of MERS-CoV. In some embodiments, MERS-CoV has a genome sequence shown in the nucleotide sequence of SEQ ID NO: 2409, which corresponds to the nucleotide sequence of GenBank Accession No. NC_019843.3, which is incorporated by reference in its entirety.

[0107] In some embodiments, the target gene is selected from the genome of hCoV-OC43. In some embodiments, hCoV-OC43 has a genome sequence shown in the nucleotide sequence of SEQ ID NO: 2410, which corresponds to the nucleotide sequence of GenBank Accession No. NC_006213.1, which is incorporated by reference in its entirety.

Short Interfering Nucleic Acid (siNA) Molecules

[0108] As indicated above, the present disclosure provides siNA molecules comprising modified nucleotides. Any of the siNA molecules described herein may be double-stranded siNA (ds-siNA) molecules. The terms “siNA molecules” and “ds-siNA molecules” may be used interchangeably. In some embodiments, the ds-siNA molecules comprise a sense strand and an antisense strand.

[0109] The disclosed siNA molecules may comprise (a) at least one phosphorylation blocker, conjugated moiety, or 5′-stabilized end cap; and (b) a short interfering nucleic acid (siNA). In some embodiments, the phosphorylation blocker is a phosphorylation blocker disclosed herein. In some embodiments, the 5′-stabilized end cap is a 5′-stabilized end cap disclosed herein. The siNA may comprise any of the first nucleotide, second nucleotide, sense strand, or antisense strand sequences disclosed herein. The siNA may comprise 5 to 100, 5 to 90, 10 to 100, 10 to 90, 10 to 80, 10 to 70, 10 to 60, 10 to 50, 10 to 30, 10 to 25, 15 to 100, 15 to 90, 15 to 80, 15 to 70, 15 to 60, 15 to 50, 15 to 30, or 15 to 25 nucleotides. The siNA may comprise at least 5, 10, 11, 12, 13, 14, 15, 16, 17, 18, 19, 20, 21, 22, 23, 24, 25, 26, 27, 28, 29, 30, 31, 32, 33, 34, 35, 36, 37, 38, 39, or 40 nucleotides. The siNA may comprise less than or equal to 50, 45, 40, 39, 38, 37, 36, 35, 34, 33, 32, 31, 30, 29, 28, 27, 26, 25, 24, 23, 22, 21, 20, or 19 nucleotides. The nucleotides may be modified nucleotides. The siNA may be single stranded. The siNA may be double stranded. The siNA may comprise (a) a sense strand comprising 15 to 30, 15 to 25, 15 to 24, 15 to 23, 15 to 22, 15 to 21, 17 to 30, 17 to 25, 17 to 24, 17 to 23, 17 to 22, 17 to 21, 18 to 30, 18 to 25, 18 to 24, 18 to 23, 18 to 22, 18 to 21, 19 to 30, 19 to 25, 19 to 24, 19 to 23, 19 to 22, 19 to 21, 20 to 25, 20 to 24, 20 to 23, 21 to 25, 21 to 24, or 21 to 23 nucleotides; and (b) an antisense strand comprising 15 to 30, 15 to 25, 15 to 24, 15 to 23, 15 to 22, 15 to 21, 17 to 30, 17 to 25, 17 to 24, 17 to 23, 17 to 22, 17 to 21, 18 to 30, 18 to 25, 18 to 24, 18 to 23, 18 to 22, 18 to 21, 19 to 30, 19 to 25, 19 to 24, 19 to 23, 19 to 22, 19 to 21, 20 to 25, 20 to 24, 20 to 23, 21 to 25, 21 to 24, or 21 to 23 nucleotides. The siNA may comprise (a) a sense strand comprising about 15, 16, 17, 18, 19, 20, 21, 22, or 23 nucleotides; and (b) an antisense strand comprising about 15, 16, 17, 18, 19, 20, 21, 22, or 23 nucleotides. The siNA may comprise (a) a sense strand comprising about 19 nucleotides; and (b) an antisense strand comprising about 21 nucleotides. The siNA may comprise (a) a sense strand comprising about 21 nucleotides; and (b) an antisense strand comprising about 23 nucleotides.

[0110] In some embodiments, any of the siNA molecules disclosed herein further comprise one or more linkers independently selected from a phosphodiester (PO) linker, phosphorothioate (PS) linker, phosphorodithioate linker, and PS-mimic linker. In some embodiments, the PS-mimic linker is a sulfur linker. In some embodiments, the linkers are internucleotide linkers. Alternatively, or additionally, the linkers connect a nucleotide of the siNA molecule to at least one phosphorylation blocker, conjugated moiety, or 5′-stabilized end cap. In some embodiments, the linkers connect a conjugated moiety to a phosphorylation blocker or 5′-stabilized end cap.

[0111] Table 1 details sequences of the present disclosure useful for sense and antisense strands, disclosed in SEQ ID NOs: 1-2406 and 3393-4374. Table 2 details representative genome sequences of four pathogenic β-coronaviruses, disclosed in SEQ ID NOs: 2407-2410. It is understood that RNA sequences corresponding to these sequences constitute identical sequences with all T replaced with U.

[0112] In some embodiments, the target gene a sequence 15 to 30, 15 to 25, 15 to 23, 17 to 23, 19 to 23, or 19 to 21 nucleotides in length, and preferably 19 or 21 nucleotides in length, within a region of either two, three, or four of SEQ ID NOs: 2407, 2408, 2409, and 2410. In some embodiments, the first nucleotide sequence is identical to an RNA sequence corresponding to a region of each of SEQ ID NOs: 2407, 2408, 2409, and 2410. In some embodiments, the target gene a sequence 15 to 30, 15 to 25, 15 to 23, 17 to 23, 19 to 23, or 19 to 21 nucleotides in length, and preferably 19 or 21 nucleotides in length, within a region of either two, three, or four of the genomes of severe acute respiratory syndrome coronavirus 2 (SARS-CoV-2), human coronavirus OC43 (hCoV-OC43), Middle East respiratory syndrome-related coronavirus (MERS-CoV), and severe acute respiratory syndrome-related coronavirus (SARS-CoV). In some embodiments, the first nucleotide sequence is identical to an RNA sequence corresponding to a region of each of two, three, or four of the genomes of severe acute respiratory syndrome coronavirus 2 (SARS-CoV-2), human coronavirus OC43 (hCoV-OC43), Middle East respiratory syndrome-related coronavirus (MERS-CoV), and severe acute respiratory syndrome-related coronavirus (SARS-CoV). In some embodiments, the first nucleotide sequence is identical to the target gene. In some embodiments, the second nucleotide sequence is complementary to the target gene.

[0113] In some embodiments, the second nucleotide sequence is complementary to a sequence within a region of either two, three, or four of SEQ ID NOs: 2407, 2408, 2409, and 2410. In some embodiments, the second nucleotide sequence is complementary to an RNA sequence corresponding to a region of each of SEQ ID NOs: 2407, 2408, 2409, and 2410. In some embodiments, the second nucleotide sequence comprises a sequence corresponding to one of SEQ ID NOs: 1204-2406 and 3393-4374.

[0114] In some embodiments, the second nucleotide is complementary to a nucleotide region within SEQ ID NO: 2407, 2408, 2409, or 2410. In some embodiments, the second nucleotide sequence is complementary to 15 to 30, 15 to 25, 15 to 23, 15 to 22, 15 to 21, 17 to 25, 17 to 23, 17 to 22, 17 to 21, or 19 to 21 nucleotides, and preferably 19 to 21 nucleotides, and more preferably 19 or 21 nucleotides, within positions 190-216, 233-279, 288-324, 455-477, 626-651, 704-723, 3352-3378, 5384-5403, 6406-6483, 7532-7551, 9588-9606, 10484-10509, 11609-11630, 11834-11853, 12023-12045, 12212-12234, 12401-12420, 12839-12867, 12885-12924, 12966-12990, 13151-13176, 13363-13386, 13388-13416, 13458-13416, 13458-13520, 13762-13790, 14290-14312, 14404-14429, 14500-14531, 14623-14642, 14650-14687, 14698-14717, 14722-14748, 14750-14777, 14821-14846, 14854-14873, 14875-14903, 14962-14990, 14992-15020, 15055-15140, 15172-15200, 15310-15332, 15346-15367, 15496-15518, 15622-15644, 15838-15869, 15886-15905, 15985-16010, 16057-16079, 16186-16205, 16430-16448, 16822-16865, 16954-16976, 17008-17042, 17080-17111, 17137-17156, 17269-17289, 17530-17549, 17563-17582, 17680-17699, 17746-17765, 17857-17876, 17956-17975, 18100-18122, 18196-18218, 19618-19639, 19783-19802, 19831-19850, 20107-20130, 20776-20795, 21502-21524, 24302-24325, 24446-24465, 24620-24651, 24662-24684, 25034-25057, 25104-25128, 25364-25387, 25502-25530, 26191-26227, 26232-26267, 26269-26330, 26332-26394, 26450-26481, 26574-26600, 27003-27064, 27093-27111, 27183-27212, 27382-27407, 27511-27533, 27771-27818, 28270-28296, 28397-28434, 28513-28546, 28673-28692, 28706-28726, 28744-28794, 28799-28827, 28946-28972, 28976-29034, 29144-29172, 29174-29196, 29228-29259, 29285-29305, 29342-29394, 29444-29463, 29543-29566, 29598-29630, 29652-29687, 29689-29731, 29733-29757, or 29770-29828 of SEQ ID NO: 2407. In some embodiments, the second nucleotide sequence is complementary to any one of SEQ ID NOs: 1-1203 and 2411-3392. In some embodiments, the second nucleotide sequence is identical to an RNA corresponding to any one of SEQ ID NOs: 1204-2406 and 3393-4374.

[0115] In some embodiments, the first nucleotide sequence is identical to a nucleotide region within SEQ ID NOs: 2407, 2408, 2409, or 2410, with the exception that the thymines (Ts) in SEQ ID NOs: 2407, 2408, 2409, or 2410 are replaced with uracil (U). In some embodiments, the first nucleotide sequence is identical to 15 to 30, 15 to 25, 15 to 23, 15 to 22, 15 to 21, 17 to 25, 17 to 23, 17 to 22, 17 to 21, or 19 to 21 nucleotides, and preferably 19 to 21 nucleotides, and more preferably 19 or 21 nucleotides, within positions 190-216, 233-279, 288-324, 455-477, 626-651, 704-723, 3352-3378, 5384-5403, 6406-6483, 7532-7551, 9588-9606, 10484-10509, 11609-11630, 11834-11853, 12023-12045, 12212-12234, 12401-12420, 12839-12867, 12885-12924, 12966-12990, 13151-13176, 13363-13386, 13388-13416, 13458-13416, 13458-13520, 13762-13790, 14290-14312, 14404-14429, 14500-14531, 14623-14642, 14650-14687, 14698-14717, 14722-14748, 14750-14777, 14821-14846, 14854-14873, 14875-14903, 14962-14990, 14992-15020, 15055-15140, 15172-15200, 15310-15332, 15346-15367, 15496-15518, 15622-15644, 15838-15869, 15886-15905, 15985-16010, 16057-16079, 16186-16205, 16430-16448, 16822-16865, 16954-16976, 17008-17042, 17080-17111, 17137-17156, 17269-17289, 17530-17549, 17563-17582, 17680-17699, 17746-17765, 17857-17876, 17956-17975, 18100-18122, 18196-18218, 19618-19639, 19783-19802, 19831-19850, 20107-20130, 20776-20795, 21502-21524, 24302-24325, 24446-24465, 24620-24651, 24662-24684, 25034-25057, 25104-25128, 25364-25387, 25502-25530, 26191-26227, 26232-26267, 26269-26330, 26332-26394, 26450-26481, 26574-26600, 27003-27064, 27093-27111, 27183-27212, 27382-27407, 27511-27533, 27771-27818, 28270-28296, 28397-28434, 28513-28546, 28673-28692, 28706-28726, 28744-28794, 28799-28827, 28946-28972, 28976-29034, 29144-29172, 29174-29196, 29228-29259, 29285-29305, 29342-29394, 29444-29463, 29543-29566, 29598-29630, 29652-29687, 29689-29731, 29733-29757, or 29770-29828 of SEQ ID NO: 2407. In some embodiments, the first nucleotide sequence is identical to an RNA corresponding to any one of SEQ ID NOs: 1-1203 and 2411-3392. In some embodiments, the first nucleotide sequence is complementary to any one of SEQ ID NOs: 1204-2406 and 3393-4374.

[0116] An exemplary siNA molecule of the present disclosure is shown in FIG. 4. As shown in FIG. 4, an exemplary siNA molecule can comprise a sense strand (101) and an antisense strand (102). The sense strand (101) may comprise a first oligonucleotide sequence (103). The first oligonucleotide sequence (103) may comprise one or more phosphorothioate internucleoside linkages (109). The phosphorothioate internucleoside linkage (109) may be between the nucleotides at the 5′ or 3′ terminal end of the first oligonucleotide sequence (103). The phosphorothioate internucleoside linkage (109) may be between the first three nucleotides from the 5′ end of the first oligonucleotide sequence (103). The first oligonucleotide sequence (103) may comprise one or more 2′-fluoro nucleotides (110). The first oligonucleotide sequence (103) may comprise one or more 2′-O-methyl nucleotides (111). The first oligonucleotide sequence (103) may comprise 15 or more modified nucleotides independently selected from 2′-fluoro nucleotides (110) and 2′-O-methyl nucleotides (111). The sense strand (101) may further comprise a phosphorylation blocker (105). The sense strand (101) may further comprise an optional conjugated moiety (106). The antisense strand (102) may comprise a second oligonucleotide sequence (104). The second oligonucleotide sequence (104) may comprise one or more phophorothioate internucleoside linkages (109). The phosphorothioate internucleoside linkage (109) may be between the nucleotides at the 5′ or 3′ terminal end of the second oligonucleotide sequence (104). The phosphorothioate internucleoside linkage (109) may be between the first three nucleotides from the 5′ end of the second oligonucleotide sequence (104). The phosphorothioate internucleoside linkage (109) may be between the first three nucleotides from the 3′ end of the second oligonucleotide sequence (104). The second oligonucleotide sequence (104) may comprise one or more 2′-fluoro nucleotides (110). The second oligonucleotide sequence (104) may comprise one or more 2′-O-methyl nucleotides (111). The second oligonucleotide sequence (104) may comprise 15 or more modified nucleotides independently selected from 2′-fluoro nucleotides (110) and 2′-O-methyl nucleotides (111). The antisense strand (102) may further comprise a 5′-stabilized end cap (107). The siNA may further comprise one or more blunt ends. Alternatively, or additionally, one end of the siNA may comprise an overhang (108). The overhang (108) may be part of the sense strand (101). The overhang (108) may be part of the antisense strand (102). The overhang (108) may be distinct from the first nucleotide sequence (103). The overhang (108) may be distinct from the second nucleotide sequence (104). The overhang (108) may be part of the first nucleotide sequence (103). The overhang (108) may be part of the second nucleotide sequence (104). The overhang (108) may comprise 1 or more nucleotides. The overhang (108) may comprise 1 or more deoxyribonucleotides. The overhang (108) may comprise 1 or more modified nucleotides. The overhang (108) may comprise 1 or more modified ribonucleotides. The sense strand (101) may be shorter than the antisense strand (102). The sense strand (101) may be the same length as the antisense strand (102). The sense strand (101) may be longer than the antisense strand (102).

[0117] Another exemplary siNA molecule of the present disclosure is shown in FIG. 5. As shown in FIG. 5, an exemplary siNA molecule can comprise a sense strand (201) and an antisense strand (202). The sense strand (201) may comprise a first oligonucleotide sequence (203). The first oligonucleotide sequence (203) may comprise one or more phophorothioate internucleoside linkages (209). The phosphorothioate internucleoside linkage (209) may be between the nucleotides at the 5′ or 3′ terminal end of the first oligonucleotide sequence (203). The phosphorothioate internucleoside linkage (209) may be between the first three nucleotides from the 5′ end of the first oligonucleotide sequence (203). The first oligonucleotide sequence (203) may comprise one or more 2′-fluoro nucleotides (210). The first oligonucleotide sequence (203) may comprise one or more 2′-O-methyl nucleotides (211). The first oligonucleotide sequence (203) may comprise 15 or more modified nucleotides independently selected from 2′-fluoro nucleotides (210) and 2′-O-methyl nucleotides (211). The sense strand (201) may further comprise a phosphorylation blocker (205). The sense strand (201) may further comprise an optional conjugated moiety (206). The antisense strand (202) may comprise a second oligonucleotide sequence (204). The second oligonucleotide sequence (204) may comprise one or more phophorothioate internucleoside linkages (209). The phosphorothioate internucleoside linkage (209) may be between the nucleotides at the 5′ or 3′ terminal end of the second oligonucleotide sequence (204). The phosphorothioate internucleoside linkage (209) may be between the first three nucleotides from the 5′ end of the second oligonucleotide sequence (204). The phosphorothioate internucleoside linkage (209) may be between the first three nucleotides from the 3′ end of the second oligonucleotide sequence (204). The second oligonucleotide sequence (204) may comprise one or more 2′-fluoro nucleotides (210). The second oligonucleotide sequence (204) may comprise one or more 2′-O-methyl nucleotides (211). The second oligonucleotide sequence (204) may comprise 15 or more modified nucleotides independently selected from 2′-fluoro nucleotides (210) and 2′-O-methyl nucleotides (211). The antisense strand (202) may further comprise a 5′-stabilized end cap (207). The siNA may further comprise one or more overhangs (208). The overhang (208) may be part of the sense strand (201). The overhang (208) may be part of the antisense strand. (202). The overhang (208) may be distinct from the first nucleotide sequence (203). The overhang (208) may be distinct from the second nucleotide sequence (204). The overhang (208) may be part of the first nucleotide sequence (203). The overhang (208) may be part of the second nucleotide sequence (204). The overhang (208) may be adjacent to the 3′ end of the first nucleotide sequence (203). The overhang (208) may be adjacent to the 5′ end of the first nucleotide sequence (203). The overhang (208) may be adjacent to the 3′ end of the second nucleotide sequence (204). The overhang (208) may be adjacent to the 5′ end of the second nucleotide sequence (204). The overhang (208) may comprise 1 or more nucleotides. The overhang (208) may comprise 1 or more deoxyribonucleotides. The overhang (208) may comprise a TT sequence. The overhang (208) may comprise 1 or more modified nucleotides. The overhang (208) may comprise 1 or more modified nucleotides disclosed herein (e.g., 2-fluoro nucleotide, 2′-O-methyl nucleotide, 2′-fluoro nucleotide mimic, 2′-O-methyl nucleotide mimic, or a nucleotide comprising a modified nucleobase). The overhang (208) may comprise 1 or more modified ribonucleotides. The sense strand (201) may be shorter than the antisense strand (202). The sense strand (201) may be the same length as the antisense strand (202). The sense strand (201) may be longer than the antisense strand (202).

[0118] FIGS. 6A-6I depict exemplary ds-siNA modification patterns. As shown in FIGS. 6A-6G, an exemplary ds-siNA molecule may have the following formula:

5′-Aₙ¹Bₙ²Aₙ³Bₙ⁴Aₙ⁵Bₙ⁶Aₙ⁷Bₙ⁸Aₙ⁹-3′
3′-C_{q}¹A_{q}²B_{q}³A_{q}⁴B_{q}⁵A_{q}⁶B_{q}⁷A_{q}⁸B_{q}⁹A_{q}¹⁰B_{q}¹¹A_{q}¹²-5′

wherein:
the top strand is a sense strand comprising a first nucleotide sequence that is at least about 60%, 65%, 70%, 75%, 80%, 85%, 90%, 95%, or 100% identical to an RNA corresponding to a target gene, wherein the first nucleotide sequence comprises 15 to 30 nucleotides;
the bottom strand is an antisense strand comprising a second nucleotide sequence that is at least about 60%, 65%, 70%, 75%, 80%, 85%, 90%, 95%, or 100% complementary to the RNA corresponding to the target gene, wherein the second nucleotide sequence comprises 15 to 30 nucleotides;
each A is independently a 2′-O-methyl nucleotide or a nucleotide comprising a 5′ stabilized end cap or phosphorylation blocker;
B is a 2′-fluoro nucleotide;
C represents overhanging nucleotides and is a 2′-O-methyl nucleotide;
n¹=1-4 nucleotides in length;
each n², n⁶, n⁸, q³, q⁵, q⁷, q⁹, q¹¹, and q¹² is independently 0-1 nucleotides in length;
each n³ and n⁴ is independently 1-3 nucleotides in length;
n⁵ is 1-10 nucleotides in length;
n⁷ is 0-4 nucleotides in length;
each n⁹, q¹, and q² is independently 0-2 nucleotides in length;
q⁴ is 0-3 nucleotides in length;
q⁶ is 0-5 nucleotides in length;
q⁸ is 2-7 nucleotides in length; and
q¹⁰ is 2-11 nucleotides in length.

[0119] The ds-siNA may further comprise a conjugated moiety. The ds-siNA may further comprise (i) phosphorothioate internucleoside linkages between the nucleotides at positions 1 and 2 and positions 2 and 3 from the 5′ end of the sense strand; and (ii) phosphorothioate internucleoside linkages between the nucleotides at positions 1 and 2; positions 2 and 3; positions 19 and 20; and positions 20 and 21 from the 5′ end of the antisense strand. The ds-siNA may further comprise a 5′-stabilizing end cap. The 5′-stabilizing end cap may be a vinyl phosphonate. The 5′-stabilizing end cap may be attached to the 5′ end of the antisense strand. In some embodiments, the 2′-O-methyl nucleotide at position 1 from the 5′ end of the sense strand is further modified to contain a 5′ stabilizing end cap. In some embodiments, the 2′-O-methyl nucleotide at position 1 from the 5′ end of the antisense strand is further modified to contain a 5′ stabilizing end cap. In some embodiments, the 2′-O-methyl nucleotide at position 1 from the 5′ end of the sense strand is further modified to contain a phosphorylation blocker. In some embodiments, the 2′-O-methyl nucleotide at position 1 from the 3′ end of the sense strand is further modified to contain a phosphorylation blocker. In some embodiments, the 2′-O-methyl nucleotide at position 1 from the 5′ end of the antisense strand is further modified to contain a phosphorylation blocker. In some embodiments, the 2′-O-methyl nucleotide at position 1 from the 3′ end of the antisense strand is further modified to contain a phosphorylation blocker. An exemplary ds-siNA molecule may have the following formula:

5′-A₂₋₄B₁A₁₋₃B₂₋₃A₂₋₁₀B₀₋₁A₀₋₄B₀₋₁A₀₋₂-3′
3′-C₂A₀₋₂B₀₋₁A₀₋₃B₀₋₁A₀₋₅B₀₋₁A₂₋₇B₁A₂₋₁₁B₁A₁-5′

wherein:
the top strand is a sense strand comprising a first nucleotide sequence that is at least about 60%, 65%, 70%, 75%, 80%, 85%, 90%, 95%, or 100% identical to an RNA corresponding to a target gene, wherein the first nucleotide sequence comprises 15 to 30 nucleotides;
the bottom strand is an antisense strand comprising a second nucleotide sequence that is at least about 60%, 65%, 70%, 75%, 80%, 85%, 90%, 95%, or 100% complementary to the RNA corresponding to the target gene, wherein the second nucleotide sequence comprises 15 to 30 nucleotides;
each A is independently a 2′-O-methyl nucleotide or a nucleotide comprising a 5′ stabilized end cap or phosphorylation blocker;
B is a 2′-fluoro nucleotide;
C represents overhanging nucleotides and is a 2′-O-methyl nucleotide.

[0120] The ds-siNA may further comprise a conjugated moiety. The ds-siNA may further comprise (i) phosphorothioate internucleoside linkages between the nucleotides at positions 1 and 2 and positions 2 and 3 from the 5′ end of the sense strand; and (ii) phosphorothioate internucleoside linkages between the nucleotides at positions 1 and 2; positions 2 and 3; positions 19 and 20; and positions 20 and 21 from the 5′ end of the antisense strand. The ds-siNA may further comprise a 5′-stabilizing end cap. The 5′-stabilizing end cap may be a vinyl phosphonate. The vinyl phosphonate may be a deuterated vinyl phosphonate. The deuterated vinyl phosphonate may be a mono-deuterated vinyl phosphonate. The deuterated vinyl phosphonate may be a mono-di-deuterated vinyl phosphonate. The 5′-stabilizing end cap may be attached to the 5′ end of the antisense strand. The 5′-stabilizing end cap may be attached to the 3′ end of the antisense strand. The 5′-stabilizing end cap may be attached to the 5′ end of the sense strand. The 5′-stabilizing end cap may be attached to the 3′ end of the sense strand. In some embodiments, the 2′-O-methyl nucleotide at position 1 from the 5′ end of the sense strand is further modified to contain a 5′ stabilizing end cap. In some embodiments, the 2′-O-methyl nucleotide at position 1 from the 5′ end of the antisense strand is further modified to contain a 5′ stabilizing end cap. In some embodiments, the 2′-O-methyl nucleotide at position 1 from the 5′ end of the sense strand is further modified to contain a phosphorylation blocker. In some embodiments, the 2′-O-methyl nucleotide at position 1 from the 3′ end of the sense strand is further modified to contain a phosphorylation blocker. In some embodiments, the 2′-O-methyl nucleotide at position 1 from the 5′ end of the antisense strand is further modified to contain a phosphorylation blocker. In some embodiments, the 2′-O-methyl nucleotide at position 1 from the 3′ end of the antisense strand is further modified to contain a phosphorylation blocker.

[0121] The exemplary ds-siNA shown in FIGS. 6A-6I comprise (i) a sense strand comprising 19-21 nucleotides; and (ii) an antisense strand comprising 21-23 nucleotides. The ds-siNA may further comprise (iii) an optional conjugated moiety, wherein the conjugated moiety is attached to the 3′ end of the antisense strand and, in some embodiments, no ps would be needed at the 3′-end of the sense strand if it is conjugated to a moiety and such conjugation my also result in removal of the 5′ overhang on the sense strand. The ds-siNA may comprise a 2-nucleotide overhang consisting of nucleotides at positions 20 and 21 from the 5′ end of the antisense strand. The ds-siNA may comprise a 2-nucleotide overhang consisting of nucleotides at positions 22 and 23 from the 5′ end of the antisense strand. The ds-siNA may further comprise 1, 2, 3, 4, 5, 6 or more phosphorothioate (ps) internucleoside linkages. At least one phosphorothioate internucleoside linkage may be between the nucleotides at positions 1 and 2 or positions 2 and 3 from the 5′ end of the sense strand. At least one phosphorothioate internucleoside linkage may be between the nucleotides at positions 1 and 2 or positions 2 and 3 from the 5′ end of the antisense strand. At least one phosphorothioate internucleoside linkage may be between the nucleotides at positions 19 and 20, positions 20 and 21, positions 21 and 22, or positions 22 and 23 from the 5′ end of the antisense strand. As shown in FIGS. 6A-6G, 4-6 nucleotides in the sense strand may be 2′-fluoro nucleotides. As shown in FIGS. 6A-6G, 2-5 nucleotides in the antisense strand may be 2′-fluoro nucleotides. As shown in FIGS. 6A-6G, 13-15 nucleotides in the sense strand may be 2′-O-methyl nucleotides. As shown in FIGS. 6A-6G, 14-19 nucleotides in the antisense strand may be 2′-O-methyl nucleotides. As shown in FIGS. 6A-6G, the ds-siNA does not contain a base pair between 2′-fluoro nucleotides on the sense and antisense strands. In some embodiments, the 2′-O-methyl nucleotide at position 1 from the 5′ end of the sense strand is further modified to contain a 5′ stabilizing end cap. In some embodiments, the 2′-O-methyl nucleotide at position 1 from the 5′ end of the antisense strand is further modified to contain a 5′ stabilizing end cap. In some embodiments, the 2′-O-methyl nucleotide at position 1 from the 5′ end of the sense strand is further modified to contain a phosphorylation blocker. In some embodiments, the 2′-O-methyl nucleotide at position 1 from the 3′ end of the sense strand is further modified to contain a phosphorylation blocker. In some embodiments, the 2′-O-methyl nucleotide at position 1 from the 5′ end of the antisense strand is further modified to contain a phosphorylation blocker. In some embodiments, the 2′-O-methyl nucleotide at position 1 from the 3′ end of the antisense strand is further modified to contain a phosphorylation blocker.

[0122] As shown in FIG. 6A, a ds-siNA may comprise (a) a sense strand consisting of 21 nucleotides, wherein 2′-fluoro nucleotides are at positions 3, 7-9, 12, and 17 from the 5′ end of the sense strand, and wherein 2′-O-methyl nucleotides are at positions 1, 2, 4-6, 10, 11, 13-16, and 18-21 from the 5′ end of the sense strand; (b) an antisense strand consisting of 21 nucleotides, wherein nucleotides at positions 2 and 14 from the 5′ end of the antisense strand are 2′-fluoro nucleotides; and wherein nucleotides at positions 1, 3-13, and 15-21 are 2′-O-methyl nucleotides. The ds-siNA may further comprise a conjugated moiety attached to the 3′ end of the sense strand. The ds-siNA may further comprise (i) phosphorothioate internucleoside linkages between the nucleotides at positions 1 and 2; positions 2 and 3; positions 19 and 20; and positions 20 and 21 from the 5′ end of the sense strand; and (ii) phosphorothioate internucleoside linkages between the nucleotides at positions 1 and 2; positions 2 and 3; positions 19 and 20; and positions 20 and 21 from the 5′ end of the antisense strand. In some embodiments, the 2′-O-methyl nucleotide at position 1 from the 5′ end of the sense strand is further modified to contain a 5′ stabilizing end cap. In some embodiments, the 2′-O-methyl nucleotide at position 1 from the 5′ end of the antisense strand is further modified to contain a 5′ stabilizing end cap. In some embodiments, the 2′-O-methyl nucleotide at position 1 from the 5′ end of the sense strand is further modified to contain a phosphorylation blocker. In some embodiments, the 2′-O-methyl nucleotide at position 1 from the 3′ end of the sense strand is further modified to contain a phosphorylation blocker. In some embodiments, the 2′-O-methyl nucleotide at position 1 from the 5′ end of the antisense strand is further modified to contain a phosphorylation blocker. In some embodiments, the 2′-O-methyl nucleotide at position 1 from the 3′ end of the antisense strand is further modified to contain a phosphorylation blocker. In some embodiments, the 2′-O-methyl nucleotide at position 1 from the 5′ end of the sense strand is a d2vd3 nucleotide. In some embodiments, the 2′-O-methyl nucleotide at position 1 from the 5′ end of the antisense strand is a d2vd3 nucleotide. In some embodiments, the 2′-O-methyl nucleotide at position 1 from the 3′ end of the sense strand is a d2vd3 nucleotide. In some embodiments, the 2′-O-methyl nucleotide at position 1 from the 3′ end of the antisense strand is a d2vd3 nucleotide. In some embodiments, at least 1, 2, 3, 4 or more 2′-fluoro nucleotides on the sense strand or antisense strand is a 2′-fluoro nucleotide mimic. In some embodiments, at least 1, 2, 3, 4 or more 2′-fluoro nucleotides on the sense strand or antisense strand is a f4P, f2P, or fX nucleotide. In some embodiments, at least 1, 2, 3, 4 or more 2′-O-methyl nucleotide on the sense or antisense strand is a 2′-O-methyl nucleotide mimic.

[0123] As shown in FIG. 6B, a ds-siNA may comprise (a) a sense strand consisting of 21 nucleotides, wherein 2′-fluoro nucleotides are at positions 3, 7, 8, 12, and 17 from the 5′ end of the sense strand, and wherein 2′-O-methyl nucleotides are at positions 1, 2, 4-6, 9-11, 13-16, and 18-21 from the 5′ end of the sense strand; (b) an antisense strand consisting of 21 nucleotides, wherein nucleotides at positions 2 and 14 from the 5′ end of the antisense strand are 2′-fluoro nucleotides; and wherein nucleotides at positions 1, 3-13, and 15-21 are 2′-O-methyl nucleotides. The ds-siNA may further comprise a conjugated moiety attached to the 3′ end of the sense strand. The ds-siNA may further comprise (i) phosphorothioate internucleoside linkages between the nucleotides at positions 1 and 2; positions 2 and 3; positions 19 and 20; and positions 20 and 21 from the 5′ end of the sense strand; and (ii) phosphorothioate internucleoside linkages between the nucleotides at positions 1 and 2; positions 2 and 3; positions 19 and 20; and positions 20 and 21 from the 5′ end of the antisense strand. In some embodiments, the 2′-O-methyl nucleotide at position 1 from the 5′ end of the sense strand is further modified to contain a 5′ stabilizing end cap. In some embodiments, the 2′-O-methyl nucleotide at position 1 from the 5′ end of the antisense strand is further modified to contain a 5′ stabilizing end cap. In some embodiments, the 2′-O-methyl nucleotide at position 1 from the 5′ end of the sense strand is further modified to contain a phosphorylation blocker. In some embodiments, the 2′-O-methyl nucleotide at position 1 from the 3′ end of the sense strand is further modified to contain a phosphorylation blocker. In some embodiments, the 2′-O-methyl nucleotide at position 1 from the 5′ end of the antisense strand is further modified to contain a phosphorylation blocker. In some embodiments, the 2′-O-methyl nucleotide at position 1 from the 3′ end of the antisense strand is further modified to contain a phosphorylation blocker. In some embodiments, the 2′-O-methyl nucleotide at position 1 from the 5′ end of the sense strand is a d2vd3 nucleotide. In some embodiments, the 2′-O-methyl nucleotide at position 1 from the 5′ end of the antisense strand is a d2vd3 nucleotide. In some embodiments, the 2′-O-methyl nucleotide at position 1 from the 3′ end of the sense strand is a d2vd3 nucleotide. In some embodiments, the 2′-O-methyl nucleotide at position 1 from the 3′ end of the antisense strand is a d2vd3 nucleotide. In some embodiments, at least 1, 2, 3, 4 or more 2′-fluoro nucleotides on the sense strand or antisense strand is a 2′-fluoro nucleotide mimic. In some embodiments, at least 1, 2, 3, 4 or more 2′-fluoro nucleotides on the sense strand or antisense strand is a f4P, f2P, or fX nucleotide. In some embodiments, at least 1, 2, 3, 4 or more 2′-O-methyl nucleotide on the sense or antisense strand is a 2′-O-methyl nucleotide mimic.

[0124] As shown in FIG. 6C, a ds-siNA may comprise (a) a sense strand consisting of 21 nucleotides, wherein 2′-fluoro nucleotides are at positions 3, 7-9, 12, and 17 from the 5′ end of the sense strand, and wherein 2′-O-methyl nucleotides are at positions 1, 2, 4-6, 10, 11, 13-16, and 18-21 from the 5′ end of the sense strand; (b) an antisense strand consisting of 21 nucleotides, wherein the nucleotides in the antisense strand comprise an alternating 1:3 modification pattern, and wherein 1 nucleotide is a 2′-fluoro nucleotide and 3 nucleotides are 2′-O-methyl nucleotides. The ds-siNA may further comprise a conjugated moiety attached to the 3′ end of the sense strand. The ds-siNA may further comprise (i) phosphorothioate internucleoside linkages between the nucleotides at positions 1 and 2; and positions 2 and 3; positions 19 and 20; and positions 20 and 21 from the 5′ end of the sense strand; and (ii) phosphorothioate internucleoside linkages between the nucleotides at positions 1 and 2; positions 2 and 3; positions 19 and 20; and positions 20 and 21 from the 5′ end of the antisense strand. The ds-siNA may comprise 2-5 alternating 1:3 modification patterns on the antisense strand. In some embodiments, the 2′-O-methyl nucleotide at position 1 from the 5′ end of the sense strand is further modified to contain a 5′ stabilizing end cap. In some embodiments, the 2′-O-methyl nucleotide at position 1 from the 5′ end of the antisense strand is further modified to contain a 5′ stabilizing end cap. In some embodiments, the 2′-O-methyl nucleotide at position 1 from the 5′ end of the sense strand is further modified to contain a phosphorylation blocker. In some embodiments, the 2′-O-methyl nucleotide at position 1 from the 3′ end of the sense strand is further modified to contain a phosphorylation blocker. In some embodiments, the 2′-O-methyl nucleotide at position 1 from the 5′ end of the antisense strand is further modified to contain a phosphorylation blocker. In some embodiments, the 2′-O-methyl nucleotide at position 1 from the 3′ end of the antisense strand is further modified to contain a phosphorylation blocker. In some embodiments, the 2′-O-methyl nucleotide at position 1 from the 5′ end of the sense strand is a d2vd3 nucleotide. In some embodiments, the 2′-O-methyl nucleotide at position 1 from the 5′ end of the antisense strand is a d2vd3 nucleotide. In some embodiments, the 2′-O-methyl nucleotide at position 1 from the 3′ end of the sense strand is a d2vd3 nucleotide. In some embodiments, the 2′-O-methyl nucleotide at position 1 from the 3′ end of the antisense strand is a d2vd3 nucleotide. In some embodiments, at least 1, 2, 3, 4 or more 2′-fluoro nucleotides on the sense strand or antisense strand is a 2′-fluoro nucleotide mimic. In some embodiments, at least 1, 2, 3, 4 or more 2′-fluoro nucleotides on the sense strand is a f4P, f2P, or fX nucleotide. In some embodiments, at least 1, 2, 3, 4 or more 2′-fluoro nucleotides on the antisense strand is a f4P, f2P, or fX nucleotide. In some embodiments, at least 1, 2, 3, 4 or more 2′-O-methyl nucleotide on the sense or antisense strand is a 2′-O-methyl nucleotide mimic.

[0125] As shown in FIG. 6D, a ds-siNA may comprise (a) a sense strand consisting of 21 nucleotides, wherein 2′-fluoro nucleotides are at positions 5 and 7-9 from the 5′ end of the sense strand, and wherein 2′-O-methyl nucleotides are at positions 1-4, 6, and 10-21 from the 5′ end of the sense strand; (b) an antisense strand consisting of 21 nucleotides, wherein the nucleotides in the antisense strand comprise an alternating 1:3 modification pattern, and wherein 1 nucleotide is a 2′-fluoro nucleotide and 3 nucleotides are 2′-O-methyl nucleotides. The ds-siNA may further comprise a conjugated moiety attached to the 3′ end of the sense strand. The ds-siNA may further comprise (i) phosphorothioate internucleoside linkages between the nucleotides at positions 1 and 2; positions 2 and 3; positions 19 and 20; and positions 20 and 21 from the 5′ end of the sense strand; and (ii) phosphorothioate internucleoside linkages between the nucleotides at positions 1 and 2; positions 2 and 3; positions 19 and 20; and positions 20 and 21 from the 5′ end of the antisense strand. The ds-siNA may comprise 2-5 alternating 1:3 modification patterns on the antisense strand. The alternating 1:3 modification pattern may start at the nucleotide at any of positions 2, 6, 10, 14, and/or 18 from the 5′ end of the antisense strand. In some embodiments, the 2′-O-methyl nucleotide at position 1 from the 5′ end of the sense strand is further modified to contain a 5′ stabilizing end cap. In some embodiments, the 2′-O-methyl nucleotide at position 1 from the 5′ end of the antisense strand is further modified to contain a 5′ stabilizing end cap. In some embodiments, the 2′-O-methyl nucleotide at position 1 from the 5′ end of the sense strand is further modified to contain a phosphorylation blocker. In some embodiments, the 2′-O-methyl nucleotide at position 1 from the 3′ end of the sense strand is further modified to contain a phosphorylation blocker. In some embodiments, the 2′-O-methyl nucleotide at position 1 from the 5′ end of the antisense strand is further modified to contain a phosphorylation blocker. In some embodiments, the 2′-O-methyl nucleotide at position 1 from the 3′ end of the antisense strand is further modified to contain a phosphorylation blocker. In some embodiments, the 2′-O-methyl nucleotide at position 1 from the 5′ end of the sense strand is a d2vd3 nucleotide. In some embodiments, the 2′-O-methyl nucleotide at position 1 from the 5′ end of the antisense strand is a d2vd3 nucleotide. In some embodiments, the 2′-O-methyl nucleotide at position 1 from the 3′ end of the sense strand is a d2vd3 nucleotide. In some embodiments, the 2′-O-methyl nucleotide at position 1 from the 3′ end of the antisense strand is a d2vd3 nucleotide. In some embodiments, at least 1, 2, 3, 4 or more 2′-fluoro nucleotides on the sense strand or antisense strand is a 2′-fluoro nucleotide mimic. In some embodiments, at least 1, 2, 3, 4 or more 2′-fluoro nucleotides on the sense strand is a f4P, f2P, or fX nucleotide. In some embodiments, at least 1, 2, 3, 4 or more 2′-fluoro nucleotides on the antisense strand is a f4P, f2P, or fX nucleotide. In some embodiments, at least 1, 2, 3, 4 or more 2′-O-methyl nucleotide on the sense or antisense strand is a 2′-O-methyl nucleotide mimic.

[0126] As shown in FIG. 6E, a ds-siNA may comprise (a) a sense strand consisting of 21 nucleotides, wherein 2′-fluoro nucleotides are at positions 5 and 7-9 from the 5′ end of the sense strand, and wherein 2′-O-methyl nucleotides are at positions 1-4, 6, and 10-21 from the 5′ end of the sense strand; (b) an antisense strand consisting of 21 nucleotides, wherein nucleotides at positions 2, 5, 8, 14, and 17 from the 5′ end of the antisense strand are 2′-fluoro nucleotides; and wherein nucleotides at positions 1, 3-13, and 15-21 are 2′-O-methyl nucleotides. The ds-siNA may further comprise a conjugated moiety attached to the 3′ end of the sense strand. The ds-siNA may further comprise (i) phosphorothioate internucleoside linkages between the nucleotides at positions 1 and 2; positions 2 and 3; positions 19 and 20; and positions 20 and 21 from the 5′ end of the sense strand; and (ii) phosphorothioate internucleoside linkages between the nucleotides at positions 1 and 2; positions 2 and 3; positions 19 and 20; and positions 20 and 21 from the 5′ end of the antisense strand. The ds-siNA may comprise 2-5 alternating 1:2 modification patterns on the antisense strand. The alternating 1:2 modification pattern may start at the nucleotide at any of positions 2, 5, 8, 14, and/or 17 from the 5′ end of the antisense strand. In some embodiments, the ds-siNA comprises (a) a sense strand consisting of 19 nucleotides, wherein 2′-fluoro nucleotides are at positions 5 and 7-9 from the 5′ end of the sense strand, and wherein 2′-O-methyl nucleotides are at positions 1-4, 6, and 10-19 from the 5′ end of the sense strand; (b) an antisense strand consisting of 21 nucleotides, wherein 2′-fluoro nucleotides are at positions 2, 5, 8, 14, and 17 from the 5′ end of the antisense strand, and wherein 2′-O-methyl nucleotides are at positions 1, 3, 4, 6, 7, 9-13, 15, 16, and 18-21 from the 5′ end of the sense strand. In some embodiments, the 2′-O-methyl nucleotide at position 1 from the 5′ end of the sense strand is further modified to contain a 5′ stabilizing end cap. In some embodiments, the 2′-O-methyl nucleotide at position 1 from the 5′ end of the antisense strand is further modified to contain a 5′ stabilizing end cap. In some embodiments, the 2′-O-methyl nucleotide at position 1 from the 5′ end of the sense strand is further modified to contain a phosphorylation blocker. In some embodiments, the 2′-O-methyl nucleotide at position 1 from the 3′ end of the sense strand is further modified to contain a phosphorylation blocker. In some embodiments, the 2′-O-methyl nucleotide at position 1 from the 5′ end of the antisense strand is further modified to contain a phosphorylation blocker. In some embodiments, the 2′-O-methyl nucleotide at position 1 from the 3′ end of the antisense strand is further modified to contain a phosphorylation blocker. In some embodiments, the 2′-O-methyl nucleotide at position 1 from the 5′ end of the sense strand is a d2vd3 nucleotide. In some embodiments, the 2′-O-methyl nucleotide at position 1 from the 5′ end of the antisense strand is a d2vd3 nucleotide. In some embodiments, the 2′-O-methyl nucleotide at position 1 from the 3′ end of the sense strand is a d2vd3 nucleotide. In some embodiments, the 2′-O-methyl nucleotide at position 1 from the 3′ end of the antisense strand is a d2vd3 nucleotide. In some embodiments, at least 1, 2, 3, 4 or more 2′-fluoro nucleotides on the sense strand or antisense strand is a 2′-fluoro nucleotide mimic. In some embodiments, at least 1, 2, 3, 4 or more 2′-fluoro nucleotides on the sense strand is a f4P, f2P, or fX nucleotide. In some embodiments, at least 1, 2, 3, 4 or more 2′-fluoro nucleotides on the antisense strand is a f4P, f2P, or fX nucleotide. In some embodiments, at least 1, 2, 3, 4 or more 2′-O-methyl nucleotide on the sense or antisense strand is a 2′-O-methyl nucleotide mimic.

[0127] As shown in FIG. 6F, a ds-siNA may comprise (a) a sense strand consisting of 21 nucleotides, wherein 2′-fluoro nucleotides are at positions 5 and 7-9 from the 5′ end of the sense strand, and wherein 2′-O-methyl nucleotides are at positions 1-4, 6, and 10-21 from the 5′ end of the sense strand; (b) an antisense strand consisting of 21 nucleotides, wherein 2′-fluoro nucleotides are at positions 2, 6, 14, and 16 from the 5′ end of the antisense strand, and wherein 2′-O-methyl nucleotides are at positions 1, 3-5, 7-13, 15, and 17-21 from the 5′ end of the antisense strand. The ds-siNA may further comprise a conjugated moiety attached to the 3′ end of the sense strand. The ds-siNA may further comprise (i) phosphorothioate internucleoside linkages between the nucleotides at positions 1 and 2; positions 2 and 3; positions 19 and 20; and positions 20 and 21 from the 5′ end of the sense strand; and (ii) phosphorothioate internucleoside linkages between the nucleotides at positions 1 and 2; positions 2 and 3; positions 19 and 20; and positions 20 and 21 from the 5′ end of the antisense strand. In some embodiments, at least 1, 2, 3, 4 or more 2′-fluoro nucleotides on the sense strand or antisense strand is a f4P, f2P, or fX nucleotide. In some embodiments, at least 1, 2, 3, 4 or more 2′-fluoro nucleotides on the sense strand or antisense strand is a f4P nucleotide. In some embodiments, at least 1, 2, 3, or 4 of the 2′-fluoro-nucleotides at positions 2, 6, 14, and 16 from the 5′ end of the antisense strand is a f4P nucleotide. In some embodiments, at least one of the 2′-fluoro-nucleotides at positions 2, 6, 14, and 16 from the 5′ end of the antisense strand is a f4P nucleotide. In some embodiments, at least two of the 2′-fluoro-nucleotides at positions 2, 6, 14, and 16 from the 5′ end of the antisense strand is a f4P nucleotide. In some embodiments, less than or equal to 3 of the 2′-fluoro-nucleotides at positions 2, 6, 14, and 16 from the 5′ end of the antisense strand is a f4P nucleotide. In some embodiments, less than or equal to 2 of the 2′-fluoro-nucleotides at positions 2, 6, 14, and 16 from the 5′ end of the antisense strand is a f4P nucleotide. In some embodiments, the 2′-fluoro-nucleotide at position 2 from the 5′ end of the antisense strand is a f4P nucleotide. In some embodiments, the 2′-fluoro-nucleotide at position 6 from the 5′ end of the antisense strand is a f4P nucleotide. In some embodiments, the 2′-fluoro-nucleotide at position 14 from the 5′ end of the antisense strand is a f4P nucleotide. In some embodiments, the 2′-fluoro-nucleotide at position 16 from the 5′ end of the antisense strand is a f4P nucleotide. In some embodiments, at least 1, 2, 3, 4 or more 2′-fluoro nucleotides on the sense strand or antisense strand is a f2P nucleotide. In some embodiments, at least 1, 2, 3, or 4 of the 2′-fluoro-nucleotides at positions 2, 6, 14, and 16 from the 5′ end of the antisense strand is a f2P nucleotide. In some embodiments, at least one of the 2′-fluoro-nucleotides at positions 2, 6, 14, and 16 from the 5′ end of the antisense strand is a f2P nucleotide. In some embodiments, at least two of the 2′-fluoro-nucleotides at positions 2, 6, 14, and 16 from the 5′ end of the antisense strand is a f2P nucleotide. In some embodiments, less than or equal to 3 of the 2′-fluoro-nucleotides at positions 2, 6, 14, and 16 from the 5′ end of the antisense strand is a f2P nucleotide. In some embodiments, less than or equal to 2 of the 2′-fluoro-nucleotides at positions 2, 6, 14, and 16 from the 5′ end of the antisense strand is a f2P nucleotide. In some embodiments, the 2′-fluoro-nucleotide at position 2 from the 5′ end of the antisense strand is a f2P nucleotide. In some embodiments, the 2′-fluoro-nucleotide at position 6 from the 5′ end of the antisense strand is a f2P nucleotide. In some embodiments, the 2′-fluoro-nucleotide at position 14 from the 5′ end of the antisense strand is a f2P nucleotide. In some embodiments, the 2′-fluoro-nucleotide at position 16 from the 5′ end of the antisense strand is a f2P nucleotide. In some embodiments, at least 1, 2, 3, 4 or more 2′-fluoro nucleotides on the sense strand or antisense strand is a fX nucleotide. In some embodiments, at least 1, 2, 3, or 4 of the 2′-fluoro-nucleotides at positions 2, 6, 14, and 16 from the 5′ end of the antisense strand is a fX nucleotide. In some embodiments, at least one of the 2′-fluoro-nucleotides at positions 2, 6, 14, and 16 from the 5′ end of the antisense strand is a fX nucleotide. In some embodiments, at least two of the 2′-fluoro-nucleotides at positions 2, 6, 14, and 16 from the 5′ end of the antisense strand is a fX nucleotide. In some embodiments, less than or equal to 3 of the 2′-fluoro-nucleotides at positions 2, 6, 14, and 16 from the 5′ end of the antisense strand is a fX nucleotide. In some embodiments, less than or equal to 2 of the 2′-fluoro-nucleotides at positions 2, 6, 14, and 16 from the 5′ end of the antisense strand is a fX nucleotide. In some embodiments, the 2′-fluoro-nucleotide at position 2 from the 5′ end of the antisense strand is a fX nucleotide. In some embodiments, the 2′-fluoro-nucleotide at position 6 from the 5′ end of the antisense strand is a fX nucleotide. In some embodiments, the 2′-fluoro-nucleotide at position 14 from the 5′ end of the antisense strand is a fX nucleotide. In some embodiments, the 2′-fluoro-nucleotide at position 16 from the 5′ end of the antisense strand is a fX nucleotide. In some embodiments, the 2′-O-methyl nucleotide at position 1 from the 5′ end of the sense strand is further modified to contain a 5′ stabilizing end cap. In some embodiments, the 2′-O-methyl nucleotide at position 1 from the 5′ end of the antisense strand is further modified to contain a 5′ stabilizing end cap. In some embodiments, the 2′-O-methyl nucleotide at position 1 from the 5′ end of the sense strand is further modified to contain a phosphorylation blocker. In some embodiments, the 2′-O-methyl nucleotide at position 1 from the 3′ end of the sense strand is further modified to contain a phosphorylation blocker. In some embodiments, the 2′-O-methyl nucleotide at position 1 from the 5′ end of the antisense strand is further modified to contain a phosphorylation blocker. In some embodiments, the 2′-O-methyl nucleotide at position 1 from the 3′ end of the antisense strand is further modified to contain a phosphorylation blocker. In some embodiments, the 2′-O-methyl nucleotide at position 1 from the 5′ end of the sense strand is a d2vd3 nucleotide. In some embodiments, the 2′-O-methyl nucleotide at position 1 from the 5′ end of the antisense strand is a d2vd3 nucleotide. In some embodiments, the 2′-O-methyl nucleotide at position 1 from the 3′ end of the sense strand is a d2vd3 nucleotide. In some embodiments, the 2′-O-methyl nucleotide at position 1 from the 3′ end of the antisense strand is a d2vd3 nucleotide. In some embodiments, at least 1, 2, 3, 4 or more 2′-fluoro nucleotides on the sense strand or antisense strand is a 2′-fluoro nucleotide mimic. In some embodiments, at least 1, 2, 3, 4 or more 2′-fluoro nucleotides on the sense strand is a f4P, f2P, or fX nucleotide. In some embodiments, at least 1, 2, 3, 4 or more 2′-fluoro nucleotides on the antisense strand is a f4P, f2P, or fX nucleotide. In some embodiments, at least 1, 2, 3, 4 or more 2′-O-methyl nucleotide on the sense or antisense strand is a 2′-O-methyl nucleotide mimic.

[0128] As shown in FIG. 6G, a ds-siNA may comprise (a) a sense strand consisting of 21 nucleotides, wherein 2′-fluoro nucleotides are at positions 5, 9-11, 14, and 19 from the 5′ end of the sense strand, and wherein 2′-O-methyl nucleotides are at positions 1-4, 6-8, 12, 13, 15-18, 20, and 21 from the 5′ end of the sense strand; and (b) an antisense strand consisting of 23 nucleotides, wherein 2′-flouro nucleotides are at positions 2 and 14 from the 5′ end of the antisense strand, and wherein 2′-O-methyl nucleotides are at positions 1, 3-13, and 15-23 from the 5′ end of the antisense strand. The ds-siNA may further comprise a conjugated moiety attached to the 3′ end of the sense strand. The ds-siNA may further comprise (i) phosphorothioate internucleoside linkages between the nucleotides at positions 1 and 2; positions 2 and 3; and positions 20 and 21 from the 5′ end of the sense strand; and (ii) phosphorothioate internucleoside linkages between the nucleotides at positions 1 and 2; positions 2 and 3; positions 21 and 22; and positions 22 and 23 from the 5′ end of the antisense strand. In some embodiments, the 2′-O-methyl nucleotide at position 1 from the 5′ end of the sense strand is further modified to contain a 5′ stabilizing end cap. In some embodiments, the 2′-O-methyl nucleotide at position 1 from the 5′ end of the antisense strand is further modified to contain a 5′ stabilizing end cap. In some embodiments, the 2′-O-methyl nucleotide at position 1 from the 5′ end of the sense strand is further modified to contain a phosphorylation blocker. In some embodiments, the 2′-O-methyl nucleotide at position 1 from the 3′ end of the sense strand is further modified to contain a phosphorylation blocker. In some embodiments, the 2′-O-methyl nucleotide at position 1 from the 5′ end of the antisense strand is further modified to contain a phosphorylation blocker. In some embodiments, the 2′-O-methyl nucleotide at position 1 from the 3′ end of the antisense strand is further modified to contain a phosphorylation blocker. In some embodiments, the 2′-O-methyl nucleotide at position 1 from the 5′ end of the sense strand is a d2vd3 nucleotide. In some embodiments, the 2′-O-methyl nucleotide at position 1 from the 5′ end of the antisense strand is a d2vd3 nucleotide. In some embodiments, the 2′-O-methyl nucleotide at position 1 from the 3′ end of the sense strand is a d2vd3 nucleotide. In some embodiments, the 2′-O-methyl nucleotide at position 1 from the 3′ end of the antisense strand is a d2vd3 nucleotide. In some embodiments, at least 1, 2, 3, 4 or more 2′-fluoro nucleotides on the sense strand or antisense strand is a 2′-fluoro nucleotide mimic. In some embodiments, at least 1, 2, 3, 4 or more 2′-fluoro nucleotides on the sense strand is a f4P, f2P, or fX nucleotide. In some embodiments, at least 1, 2, 3, 4 or more 2′-fluoro nucleotides on the antisense strand is a f4P, f2P, or fX nucleotide. In some embodiments, at least 1, 2, 3, 4 or more 2′-O-methyl nucleotide on the sense or antisense strand is a 2′-O-methyl nucleotide mimic.

[0129] As shown in FIG. 6H, a ds-siNA may comprise (a) a sense strand consisting of 21 nucleotides, wherein 2′-fluoro nucleotides are at positions 7 and 9-11 from the 5′ end of the sense strand, and wherein 2′-O-methyl nucleotides are at positions 1-6, 8, and 12-21 from the 5′ end of the sense strand; and (b) an antisense strand consisting of 23 nucleotides, wherein 2′-flouro nucleotides are at positions 2, 6, 14, and 16 from the 5′ end of the antisense strand, and wherein 2′-O-methyl nucleotides are at positions 1, 3-5, 7-13, 15, and 17-23 from the 5′ end of the antisense strand. The ds-siNA may further comprise a conjugated moiety attached to the 3′ end of the sense strand. The ds-siNA may further comprise (i) phosphorothioate internucleoside linkages between the nucleotides at positions 1 and 2; positions 2 and 3; and positions 20 and 21 from the 5′ end of the sense strand; and (ii) phosphorothioate internucleoside linkages between the nucleotides at positions 1 and 2; positions 2 and 3; positions 21 and 22; and positions 22 and 23 from the 5′ end of the antisense strand. In some embodiments, the 2′-O-methyl nucleotide at position 1 from the 5′ end of the sense strand is further modified to contain a 5′ stabilizing end cap. In some embodiments, the 2′-O-methyl nucleotide at position 1 from the 5′ end of the antisense strand is further modified to contain a 5′ stabilizing end cap. In some embodiments, the 2′-O-methyl nucleotide at position 1 from the 5′ end of the sense strand is further modified to contain a phosphorylation blocker. In some embodiments, the 2′-O-methyl nucleotide at position 1 from the 3′ end of the sense strand is further modified to contain a phosphorylation blocker. In some embodiments, the 2′-O-methyl nucleotide at position 1 from the 5′ end of the antisense strand is further modified to contain a phosphorylation blocker. In some embodiments, the 2′-O-methyl nucleotide at position 1 from the 3′ end of the antisense strand is further modified to contain a phosphorylation blocker. In some embodiments, the 2′-O-methyl nucleotide at position 1 from the 5′ end of the sense strand is a d2vd3 nucleotide. In some embodiments, the 2′-O-methyl nucleotide at position 1 from the 5′ end of the antisense strand is a d2vd3 nucleotide. In some embodiments, the 2′-O-methyl nucleotide at position 1 from the 3′ end of the sense strand is a d2vd3 nucleotide. In some embodiments, the 2′-O-methyl nucleotide at position 1 from the 3′ end of the antisense strand is a d2vd3 nucleotide. In some embodiments, at least 1, 2, 3, 4 or more 2′-fluoro nucleotides on the sense strand or antisense strand is a 2′-fluoro nucleotide mimic. In some embodiments, at least 1, 2, 3, 4 or more 2′-fluoro nucleotides on the sense strand is a f4P, f2P, or fX nucleotide. In some embodiments, at least 1, 2, 3, 4 or more 2′-fluoro nucleotides on the antisense strand is a f4P, f2P, or fX nucleotide. In some embodiments, at least 1, 2, 3, 4 or more 2′-O-methyl nucleotide on the sense or antisense strand is a 2′-O-methyl nucleotide mimic.

[0130] As shown in FIG. 6I, a ds-siNA may comprise (a) a sense strand consisting of 21 nucleotides, wherein 2′-fluoro nucleotides are at positions 7 and 9-11 from the 5′ end of the sense strand, and wherein 2′-O-methyl nucleotides are at positions 1-6, 8, and 12-21 from the 5′ end of the sense strand; and (b) an antisense strand consisting of 23 nucleotides, wherein 2′-flouro nucleotides are at positions 2, 5, 8, 14, 17, and 20 from the 5′ end of the antisense strand, and wherein 2′-O-methyl nucleotides are at positions 1, 3, 4, 6, 9-13, 15, 16, 18, 19, and 21-23 from the 5′ end of the antisense strand. The ds-siNA may further comprise a conjugated moiety attached to the 3′ end of the sense strand. The ds-siNA may further comprise (i) phosphorothioate internucleoside linkages between the nucleotides at positions 1 and 2; positions 2 and 3; and positions 20 and 21 from the 5′ end of the sense strand; and (ii) phosphorothioate internucleoside linkages between the nucleotides at positions 1 and 2; positions 2 and 3; positions 21 and 22; and positions 22 and 23 from the 5′ end of the antisense strand. In some embodiments, the 2′-O-methyl nucleotide at position 1 from the 5′ end of the sense strand is further modified to contain a 5′ stabilizing end cap. In some embodiments, the 2′-O-methyl nucleotide at position 1 from the 5′ end of the antisense strand is further modified to contain a 5′ stabilizing end cap. In some embodiments, the 2′-O-methyl nucleotide at position 1 from the 5′ end of the sense strand is further modified to contain a phosphorylation blocker. In some embodiments, the 2′-O-methyl nucleotide at position 1 from the 3′ end of the sense strand is further modified to contain a phosphorylation blocker. In some embodiments, the 2′-O-methyl nucleotide at position 1 from the 5′ end of the antisense strand is further modified to contain a phosphorylation blocker. In some embodiments, the 2′-O-methyl nucleotide at position 1 from the 3′ end of the antisense strand is further modified to contain a phosphorylation blocker. In some embodiments, the 2′-O-methyl nucleotide at position 1 from the 5′ end of the sense strand is a d2vd3 nucleotide. In some embodiments, the 2′-O-methyl nucleotide at position 1 from the 5′ end of the antisense strand is a d2vd3 nucleotide. In some embodiments, the 2′-O-methyl nucleotide at position 1 from the 3′ end of the sense strand is a d2vd3 nucleotide. In some embodiments, the 2′-O-methyl nucleotide at position 1 from the 3′ end of the antisense strand is a d2vd3 nucleotide. In some embodiments, at least 1, 2, 3, 4 or more 2′-fluoro nucleotides on the sense strand or antisense strand is a 2′-fluoro nucleotide mimic. In some embodiments, at least 1, 2, 3, 4 or more 2′-fluoro nucleotides on the sense strand is a f4P, f2P, or fX nucleotide. In some embodiments, at least 1, 2, 3, 4 or more 2′-fluoro nucleotides on the antisense strand is a f4P, f2P, or fX nucleotide. In some embodiments, at least 1, 2, 3, 4 or more 2′-O-methyl nucleotide on the sense or antisense strand is a 2′-O-methyl nucleotide mimic.

[0131] In some embodiments, the nucleotides in the antisense strand may comprise an alternating 1:2 modification pattern, wherein 1 nucleotide is a 2′-fluoro nucleotide and 2 nucleotides are 2′-O-methyl nucleotides. In some embodiments, the nucleotides in the antisense strand may comprise an alternating 1:1 modification pattern (i.e., an alternating pattern), wherein 1 nucleotide is a 2′-fluoro nucleotide and 1 nucleotide is a 2′-O-methyl nucleotide in an alternating fashion. These alternating modification patterns may start at any nucleotide of the antisense strand.

[0132] Any of the siNAs disclosed herein may comprise a sense strand and an antisense strand. The sense strand may comprise a first nucleotide sequence that is 15 to 30 nucleotides in length. The antisense strand may comprise a second nucleotide sequence that is 15 to 30 nucleotides in length.

[0133] A double-stranded short interfering nucleic acid (ds-siNA) molecule of this disclosure may comprise: (a) a sense strand comprising a first nucleotide sequence that is at least about 60%, 65%, 70%, 75%, 80%, 85%, 90%, 95%, or 100% identical to an RNA corresponding to a target gene, wherein the first nucleotide sequence: (i) is 15 to 30 nucleotides in length; and (ii) comprises 15 or more modified nucleotides independently selected from a 2′-O-methyl nucleotide and a 2′-fluoro nucleotide, wherein at least one modified nucleotide is a 2′-O-methyl nucleotide and the nucleotide at position 3, 5, 7, 8, 9, 10, 11, 12, 14, 17, and/or 19 from the 5′ end of the first nucleotide sequence is a 2′-fluoro nucleotide; and (b) an antisense strand comprising a second nucleotide sequence that is at least about 60%, 65%, 70%, 75%, 80%, 85%, 90%, 95%, or 100% complementary to the RNA corresponding to the target gene, wherein the second nucleotide sequence: (i) is 15 to 30 nucleotides in length; and (ii) comprises 15 or more modified nucleotides independently selected from a 2′-O-methyl nucleotide and a 2′-fluoro nucleotide, wherein at least one modified nucleotide is a 2′-O-methyl nucleotide and at least one modified nucleotide is a 2′-fluoro nucleotide.

[0134] A double-stranded short interfering nucleic acid (ds-siNA) molecule of the disclosure may comprise: (a) a sense strand comprising a first nucleotide sequence that is at least about 60%, 65%, 70%, 75%, 80%, 85%, 90%, 95%, or 100% identical to an RNA corresponding to a target gene, wherein the first nucleotide sequence: (i) is 15 to 30 nucleotides in length; and (ii) comprises 15 or more modified nucleotides independently selected from a 2′-O-methyl nucleotide and a 2′-fluoro nucleotide, wherein at least one modified nucleotide is a 2′-O-methyl nucleotide and the nucleotide at position 3, 5, 7, 8, 9, 10, 11, 12, 14, 17, and/or 19 from the 5′ end of the first nucleotide sequence is a 2′-fluoro nucleotide; and (b) an antisense strand comprising a second nucleotide sequence that is at least about 60%, 65%, 70%, 75%, 80%, 85%, 90%, 95%, or 100% complementary to the RNA corresponding to the target gene, wherein the second nucleotide sequence: (i) is 15 to 30 nucleotides in length; and (ii) comprises 15 or more modified nucleotides independently selected from a 2′-O-methyl nucleotide and a 2′-fluoro nucleotide, wherein at least one modified nucleotide is a 2′-O-methyl nucleotide and at least one modified nucleotide is a 2′-fluoro nucleotide.

[0135] A double-stranded short interfering nucleic acid (ds-siNA) molecule of the disclosure may comprise: (a) a sense strand comprising a first nucleotide sequence that is at least about 60%, 65%, 70%, 75%, 80%, 85%, 90%, 95%, or 100% identical to an RNA corresponding to a target gene, wherein the first nucleotide sequence: (i) is 15 to 30 nucleotides in length; and (ii) comprises 15 or more modified nucleotides independently selected from a 2′-O-methyl nucleotide and a 2′-fluoro nucleotide, wherein at least one modified nucleotide is a 2′-O-methyl nucleotide and the nucleotide at position 7 from the 5′ end of the first nucleotide sequence is a 2′-fluoro nucleotide; and (b) an antisense strand comprising a second nucleotide sequence that is at least about 60%, 65%, 70%, 75%, 80%, 85%, 90%, 95%, or 100% complementary to the RNA corresponding to the target gene, wherein the second nucleotide sequence: (i) is 15 to 30 nucleotides in length; and (ii) comprises 15 or more modified nucleotides independently selected from a 2′-O-methyl nucleotide and a 2′-fluoro nucleotide, wherein at least one modified nucleotide is a 2′-O-methyl nucleotide and at least one modified nucleotide is a 2′-fluoro nucleotide.

[0136] A double-stranded short interfering nucleic acid (ds-siNA) molecule of the disclosure may comprise: (a) a sense strand comprising a first nucleotide sequence that is at least about 60%, 65%, 70%, 75%, 80%, 85%, 90%, 95%, or 100% identical to an RNA corresponding to a target gene, wherein the first nucleotide sequence: (i) is 15 to 30 nucleotides in length; and (ii) comprises 15 or more modified nucleotides independently selected from a 2′-O-methyl nucleotide and a 2′-fluoro nucleotide, wherein at least one modified nucleotide is a 2′-O-methyl nucleotide and the nucleotide at position 7, 9, 10, and/or 11 from the 5′ end of the first nucleotide sequence is a 2′-fluoro nucleotide; and (b) an antisense strand comprising a second nucleotide sequence that is at least about 60%, 65%, 70%, 75%, 80%, 85%, 90%, 95%, or 100% complementary to the RNA corresponding to the target gene, wherein the second nucleotide sequence: (i) is 15 to 30 nucleotides in length; and (ii) comprises 15 or more modified nucleotides independently selected from a 2′-O-methyl nucleotide and a 2′-fluoro nucleotide, wherein at least one modified nucleotide is a 2′-O-methyl nucleotide and at least one modified nucleotide is a 2′-fluoro nucleotide.

[0137] A double-stranded short interfering nucleic acid (ds-siNA) molecule of the disclosure may comprise: (a) a sense strand comprising a first nucleotide sequence that is at least about 60%, 65%, 70%, 75%, 80%, 85%, 90%, 95%, or 100% identical to an RNA corresponding to a target gene, wherein the first nucleotide sequence: (i) is 15 to 30 nucleotides in length; and (ii) comprises 15 or more modified nucleotides independently selected from a 2′-O-methyl nucleotide and a 2′-fluoro nucleotide, wherein at least one modified nucleotide is a 2′-O-methyl nucleotide and at least one modified nucleotide is a 2′-fluoro nucleotide; and (b) an antisense strand comprising a second nucleotide sequence that is at least about 60%, 65%, 70%, 75%, 80%, 85%, 90%, 95%, or 100% complementary to the RNA corresponding to the target gene, wherein the second nucleotide sequence: (i) is 15 to 30 nucleotides in length; and (ii) comprises 15 or more modified nucleotides independently selected from a 2′-O-methyl nucleotide and a 2′-fluoro nucleotide, wherein at least one modified nucleotide is a 2′-O-methyl nucleotide and the nucleotide at position 2, 5, 6, 8, 10, 14, 16, 17, and/or 18 from the 5′ end of the second nucleotide sequence is a 2′-fluoro nucleotide.

[0138] A double-stranded short interfering nucleic acid (ds-siNA) molecule of the disclosure may comprise: (a) a sense strand comprising a first nucleotide sequence that is at least about 60%, 65%, 70%, 75%, 80%, 85%, 90%, 95%, or 100% identical to an RNA corresponding to a target gene, wherein the first nucleotide sequence: (i) is 15 to 30 nucleotides in length; and (ii) comprises 15 or more modified nucleotides independently selected from a 2′-O-methyl nucleotide and a 2′-fluoro nucleotide, wherein at least one modified nucleotide is a 2′-O-methyl nucleotide and at least one modified nucleotide is a 2′-fluoro nucleotide; and (b) an antisense strand comprising a second nucleotide sequence that is at least about 60%, 65%, 70%, 75%, 80%, 85%, 90%, 95%, or 100% complementary to the RNA corresponding to the target gene, wherein the second nucleotide sequence: (i) is 15 to 30 nucleotides in length; and (ii) comprises 15 or more modified nucleotides independently selected from a 2′-O-methyl nucleotide and a 2′-fluoro nucleotide, wherein at least one modified nucleotide is a 2′-O-methyl nucleotide and the nucleotide at position 2 of the second nucleotide sequence is a 2′-fluoro nucleotide.

[0139] A double-stranded short interfering nucleic acid (ds-siNA) molecule of the disclosure may comprise: (a) a sense strand comprising a first nucleotide sequence that is at least about 60%, 65%, 70%, 75%, 80%, 85%, 90%, 95%, or 100% identical to an RNA corresponding to a target gene, wherein the first nucleotide sequence: (i) is 15 to 30 nucleotides in length; (ii) comprises 15 or more modified nucleotides independently selected from a 2′-O-methyl nucleotide and a 2′-fluoro nucleotide, wherein at least one modified nucleotide is a 2′-O-methyl nucleotide and at least one modified nucleotide is a 2′-fluoro nucleotide; and (iii) comprises 1 or more phosphorothioate internucleoside linkage; and (b) an antisense strand comprising a second nucleotide sequence that is at least about 60%, 65%, 70%, 75%, 80%, 85%, 90%, 95%, or 100% complementary to the RNA corresponding to the target gene, wherein the second nucleotide sequence: (i) is 15 to 30 nucleotides in length; (ii) comprises 15 or more modified nucleotides independently selected from a 2′-O-methyl nucleotide and a 2′-fluoro nucleotide, wherein at least one modified nucleotide is a 2′-O-methyl nucleotide and at least one modified nucleotide is a 2′-fluoro nucleotide; and (iii) comprises 1 or more phosphorothioate internucleoside linkage.

[0140] A double-stranded short interfering nucleic acid (ds-siNA) molecule of the disclosure may comprise: (a) a sense strand comprising a first nucleotide sequence that is at least about 60%, 65%, 70%, 75%, 80%, 85%, 90%, 95%, or 100% identical to an RNA corresponding to a target gene, wherein the first nucleotide sequence: (i) is 15 to 30 nucleotides in length; and (ii) comprises 15 or more modified nucleotides independently selected from a 2′-O-methyl nucleotide and a 2′-fluoro nucleotide, wherein at least one modified nucleotide is a 2′-O-methyl nucleotide and at least one modified nucleotide is a 2′-fluoro nucleotide; and (b) an antisense strand comprising a second nucleotide sequence that is at least about 60%, 65%, 70%, 75%, 80%, 85%, 90%, 95%, or 100% complementary to the RNA corresponding to the target gene, wherein the second nucleotide sequence: (i) is 15 to 30 nucleotides in length; and (ii) comprises 15 or more modified nucleotides independently selected from a 2′-O-methyl nucleotide and a 2′-fluoro nucleotide, wherein at least one modified nucleotide is a 2′-O-methyl nucleotide and at least one modified nucleotide is a 2′-fluoro nucleotide, wherein the ds-siNA may further comprise a phosphorylation blocker and/or a 5′-stabilized end cap.

[0141] A double-stranded short interfering nucleic acid (ds-siNA) molecule comprises: (I) a sense strand comprising (A) a first nucleotide sequence that is at least about 60%, 65%, 70%, 75%, 80%, 85%, 90%, 95%, or 100% identical to an RNA corresponding to a target gene, wherein the first nucleotide sequence: (i) is 15 to 30 nucleotides in length; and (ii) comprises 15 or more modified nucleotides independently selected from a 2′-O-methyl nucleotide and a 2′-fluoro nucleotide, wherein at least one modified nucleotide is a 2′-O-methyl nucleotide and at least one modified nucleotide is a 2′-fluoro nucleotide; and (B) a phosphorylation blocker; and (II) an antisense strand comprising a second nucleotide sequence that is at least about 60%, 65%, 70%, 75%, 80%, 85%, 90%, 95%, or 100% complementary to the RNA corresponding to the target gene, wherein the second nucleotide sequence: (a) is 15 to 30 nucleotides in length; and (b) comprises 15 or more modified nucleotides independently selected from a 2′-O-methyl nucleotide and a 2′-fluoro nucleotide, wherein at least one modified nucleotide is a 2′-O-methyl nucleotide and at least one modified nucleotide is a 2′-fluoro nucleotide.

[0142] A double-stranded short interfering nucleic acid (ds-siNA) molecule of the disclosure may comprise: (I) a sense strand comprising a first nucleotide sequence that is at least about 60%, 65%, 70%, 75%, 80%, 85%, 90%, 95%, or 100% identical to an RNA corresponding to a target gene, wherein the first nucleotide sequence: (a) is 15 to 30 nucleotides in length; and (b) comprises 15 or more modified nucleotides independently selected from a 2′-O-methyl nucleotide and a 2′-fluoro nucleotide, wherein at least one modified nucleotide is a 2′-O-methyl nucleotide and at least one modified nucleotide is a 2′-fluoro nucleotide; and (II) an antisense strand comprising (A) a second nucleotide sequence that is at least about 60%, 65%, 70%, 75%, 80%, 85%, 90%, 95%, or 100% complementary to the RNA corresponding to the target gene, wherein the second nucleotide sequence: (i) is 15 to 30 nucleotides in length; and (ii) comprises 15 or more modified nucleotides independently selected from a 2′-O-methyl nucleotide and a 2′-fluoro nucleotide, wherein at least one modified nucleotide is a 2′-O-methyl nucleotide and at least one modified nucleotide is a 2′-fluoro nucleotide; and (B) a 5′-stabilized end cap.

[0143] A double-stranded short interfering nucleic acid (ds-siNA) molecule of the disclosure may comprise: (I) a sense strand comprising (A) a first nucleotide sequence that is at least about 60%, 65%, 70%, 75%, 80%, 85%, 90%, 95%, or 100% identical to an RNA corresponding to a target gene, wherein the first nucleotide sequence: (i) is 15 to 30 nucleotides in length; and (ii) comprises 15 or more modified nucleotides independently selected from a 2′-O-methyl nucleotide and a 2′-fluoro nucleotide, wherein at least one modified nucleotide is a 2′-O-methyl nucleotide and at least one modified nucleotide is a 2′-fluoro nucleotide; and (B) a phosphorylation blocker; and (II) an antisense strand comprising (A) a second nucleotide sequence that is at least about 60%, 65%, 70%, 75%, 80%, 85%, 90%, 95%, or 100% complementary to the RNA corresponding to the target gene, wherein the second nucleotide sequence: (i) is 15 to 30 nucleotides in length; and (ii) comprises 15 or more modified nucleotides independently selected from a 2′-O-methyl nucleotide and a 2′-fluoro nucleotide, wherein at least one modified nucleotide is a 2′-O-methyl nucleotide and at least one modified nucleotide is a 2′-fluoro nucleotide; and (B) a 5′-stabilized end cap.

[0144] A double-stranded short interfering nucleic acid (ds-siNA) molecule of the disclosure may comprise: (a) a sense strand comprising a first nucleotide sequence that is at least about 60%, 65%, 70%, 75%, 80%, 85%, 90%, 95%, or 100% identical to an RNA corresponding to a target gene, wherein the first nucleotide sequence comprises a nucleotide sequence of any one of the sequences disclosed in Table 1; and (b) an antisense strand comprising a second nucleotide sequence that is at least about 60%, 65%, 70%, 75%, 80%, 85%, 90%, 95%, or 100% complementary to the RNA corresponding to the target gene, wherein the second nucleotide sequence comprises a nucleotide sequence of any one of the sequences disclosed in Table 1.

[0145] A double-stranded short interfering nucleic acid (ds-siNA) molecule comprises: (a) a sense strand comprising a first nucleotide sequence that is at least about 60%, 65%, 70%, 75%, 80%, 85%, 90%, 95%, or 100% identical to an RNA corresponding to a target gene, wherein the first nucleotide sequence comprises a nucleotide sequence as shown in Table 2; and (b) an antisense strand comprising a second nucleotide sequence that is at least about 60%, 65%, 70%, 75%, 80%, 85%, 90%, 95%, or 100% complementary to the RNA corresponding to the target gene, wherein the second nucleotide sequence comprises a nucleotide sequence as shown in Table 2.

[0146] Further disclosed herein are compositions comprising two or more of the siNA molecules described herein. Further disclosed herein are compositions comprising any of the siNA molecule described and a pharmaceutically acceptable carrier or diluent. Further disclosed herein are compositions comprising two or more of the siNA molecules described herein for use as a medicament. Further disclosed herein are compositions comprising any of the siNA molecule described and a pharmaceutically acceptable carrier or diluent for use as a medicament.

[0147] Further disclosed herein are methods of treating an infection (e.g., COVID-19) in a subject in need thereof, the method comprising administering to the subject any of the siNA molecules described herein. Further disclosed herein are uses of any of the siNA molecules described herein in the manufacture of a medicament for treating an infection (e.g., COVID-19).

[0148] A. siNA Sense Strand

[0149] Any of the siNA molecules or oligomers described herein may comprise a sense strand. The sense strand may comprise a first nucleotide sequence. The first nucleotide sequence may be 15 to 30, 15 to 25, 15 to 23, 17 to 23, 19 to 23, or 19 to 21 nucleotides in length. In some embodiments, the first nucleotide sequence is 15, 16, 17, 18, 19, 20, 21, 22, 23, 24, 25, 26, 27, 28, 29, or 30 nucleotides in length. In some embodiments, the first nucleotide sequence is at least 19 nucleotides in length. In some embodiments, the first nucleotide sequence is at least 21 nucleotides in length.

[0150] In some embodiments, the sense strand is the same length as the first nucleotide sequence. In some embodiments, the sense strand is longer than the first nucleotide sequence. In some embodiments, the sense strand may further comprise 1, 2, 3, 4, or 5 or more nucleotides than the first nucleotide sequence. In some embodiments, the sense strand may further comprise a deoxyribonucleic acid (DNA). In some embodiments, the DNA is thymine (T). In some embodiments, the sense strand may further comprise a TT sequence. In some embodiments, the TT sequence is adjacent to the first nucleotide sequence. In some embodiments, the sense strand may further comprise one or more modified nucleotides that are adjacent to the first nucleotide sequence. In some embodiments, the one or more modified nucleotides are independently selected from any of the modified nucleotides disclosed herein (e.g., 2′-fluoro nucleotide, 2′-O-methyl nucleotide, 2′-fluoro nucleotide mimic, 2′-O-methyl nucleotide mimic, or a nucleotide comprising a modified nucleobase).

[0151] In some embodiments, at least one end of the ds-siNA may be a blunt end. In some embodiments, at least one end of the ds-siNA may comprise an overhang, wherein the overhang comprises at least one nucleotide. In some embodiments, both ends of the ds-siNA may comprise an overhang, wherein the overhang comprises at least one nucleotide.

[0152] In some embodiments, the first nucleotide sequence comprises 15, 16, 17, 18, 19, 20, 21, 22, 23, or more modified nucleotides independently selected from a 2′-O-methyl nucleotide and a 2′-fluoro nucleotide. In some embodiments, 70%, 75%, 80%, 85%, 90%, 95% or 100% of the nucleotides in the first nucleotide sequence are modified nucleotides independently selected from a 2′-O-methyl nucleotide and a 2′-fluoro nucleotide. In some embodiments, 100% of the nucleotides in the first nucleotide sequence are modified nucleotides independently selected from a 2′-O-methyl nucleotide and a 2′-fluoro nucleotide. In some embodiments, the 2′-O-methyl nucleotide is a 2′-O-methyl nucleotide mimic. In some embodiments, the 2′-fluoro nucleotide is a 2′-fluoro nucleotide mimic.

[0153] In some embodiments, between about 15 to 30, 15 to 25, 15 to 24, 15 to 23, 15 to 22, 15 to 21, 17 to 30, 17 to 25, 17 to 24, 17 to 23, 17 to 22, 17 to 21, 18 to 30, 18 to 25, 18 to 24, 18 to 23, 18 to 22, 18 to 21, 19 to 30, 19 to 25, 19 to 24, 19 to 23, 19 to 22, 19 to 21, 20 to 25, 20 to 24, 20 to 23, 21 to 25, 21 to 24, or 21 to 23 modified nucleotides of the first nucleotide sequence are 2′-O-methyl nucleotides. In some embodiments, between about 2 to 20 modified nucleotides of the first nucleotide sequence are 2′-O-methyl nucleotides. In some embodiments, between about 5 to 25 modified nucleotides of the first nucleotide sequence are 2′-O-methyl nucleotides. In some embodiments, between about 10 to 25 modified nucleotides of the first nucleotide sequence are 2′-O-methyl nucleotides. In some embodiments, between about 12 to 25 modified nucleotides of the first nucleotide sequence are 2′-O-methyl nucleotides. In some embodiments, at least about 10, 11, 12, 13, 14, 15, 16, 17, 18, 19, 20, 21, or 22 modified nucleotides of the first nucleotide sequence are 2′-O-methyl nucleotides. In some embodiments, at least about 12 modified nucleotides of the first nucleotide sequence are 2′-O-methyl nucleotides. In some embodiments, at least about 13 modified nucleotides of the first nucleotide sequence are 2′-O-methyl nucleotides. In some embodiments, at least about 14 modified nucleotides of the first nucleotide sequence are 2′-O-methyl nucleotides. In some embodiments, at least about 15 modified nucleotides of the first nucleotide sequence are 2′-O-methyl nucleotides. In some embodiments, at least about 16 modified nucleotides of the first nucleotide sequence are 2′-O-methyl nucleotides. In some embodiments, at least about 17 modified nucleotides of the first nucleotide sequence are 2′-O-methyl nucleotides. In some embodiments, at least about 18 modified nucleotides of the first nucleotide sequence are 2′-O-methyl nucleotides. In some embodiments, at least about 19 modified nucleotides of the first nucleotide sequence are 2′-O-methyl nucleotides. In some embodiments, less than or equal to 25, 24, 23, 22, 21, 20, 19, 18, 17, 16, 15, 14, 13, 12, 11, 10, 9, 8, 7, 6, 5, 4, 3, or 2 modified nucleotides of the first nucleotide sequence are 2′-O-methyl nucleotides. In some embodiments, less than or equal to 21 modified nucleotides of the first nucleotide sequence are 2′-O-methyl nucleotides. In some embodiments, less than or equal to 20 modified nucleotides of the first nucleotide sequence are 2′-O-methyl nucleotides. In some embodiments, less than or equal to 19 modified nucleotides of the first nucleotide sequence are 2′-O-methyl nucleotides. In some embodiments, less than or equal to 18 modified nucleotides of the first nucleotide sequence are 2′-O-methyl nucleotides. In some embodiments, less than or equal to 17 modified nucleotides of the first nucleotide sequence are 2′-O-methyl nucleotides. In some embodiments, less than or equal to 16 modified nucleotides of the first nucleotide sequence are 2′-O-methyl nucleotides. In some embodiments, less than or equal to 15 modified nucleotides of the first nucleotide sequence are 2′-O-methyl nucleotides. In some embodiments, less than or equal to 14 modified nucleotides of the first nucleotide sequence are 2′-O-methyl nucleotides. In some embodiments, less than or equal to 13 modified nucleotides of the first nucleotide sequence are 2′-O-methyl nucleotides. In some embodiments, at least one modified nucleotide of the first nucleotide sequence is a 2′-O-methyl pyrimidine. In some embodiments, at least 5, 6, 7, 8, 9, or 10 modified nucleotides of the first nucleotide sequence are 2′-O-methyl pyrimidines. In some embodiments, at least one modified nucleotide of the first nucleotide sequence is a 2′-O-methyl purine. In some embodiments, at least 5, 6, 7, 8, 9, or 10 modified nucleotides of the first nucleotide sequence are 2′-O-methyl purines. In some embodiments, the 2′-O-methyl nucleotide is a 2′-O-methyl nucleotide mimic.

[0154] In some embodiments, between 2 to 15 modified nucleotides of the first nucleotide sequence are 2′-fluoro nucleotides. In some embodiments, between 2 to 10 modified nucleotides of the first nucleotide sequence are 2′-fluoro nucleotides. In some embodiments, between 2 to 6 modified nucleotides of the first nucleotide sequence are 2′-fluoro nucleotides. In some embodiments, 1 to 6, 1 to 5, 1 to 4, or 1 to 3 modified nucleotides of the first nucleotide sequence are 2′-fluoro nucleotides. In some embodiments, at least 1, 2, 3, 4, 5, or 6 modified nucleotides of the first nucleotide sequence are 2′-fluoro nucleotides. In some embodiments, at least 1 modified nucleotide of the first nucleotide sequence is a 2′-fluoro nucleotide. In some embodiments, at least 2 modified nucleotides of the first nucleotide sequence are 2′-fluoro nucleotides. In some embodiments, at least 3 modified nucleotides of the first nucleotide sequence are 2′-fluoro nucleotides. In some embodiments, at least 4 modified nucleotides of the first nucleotide sequence are 2′-fluoro nucleotides. In some embodiments, at least 5 modified nucleotides of the first nucleotide sequence are 2′-fluoro nucleotides. In some embodiments, at least 6 modified nucleotides of the first nucleotide sequence are 2′-fluoro nucleotides. In some embodiments, 10, 9, 8, 7, 6, 5, 4, 3 or fewer modified nucleotides of the first nucleotide sequence are 2′-fluoro nucleotides. In some embodiments, 10 or fewer modified nucleotides of the first nucleotide sequence are 2′-fluoro nucleotides. In some embodiments, 7 or fewer modified nucleotides of the first nucleotide sequence are 2′-fluoro nucleotides. In some embodiments, 6 or fewer modified nucleotides of the first nucleotide sequence are 2′-fluoro nucleotides. In some embodiments, 5 or fewer modified nucleotides of the first nucleotide sequence are 2′-fluoro nucleotides. In some embodiments, 4 or fewer modified nucleotides of the first nucleotide sequence are 2′-fluoro nucleotides. In some embodiments, 3 or fewer modified nucleotides of the first nucleotide sequence are 2′-fluoro nucleotides. In some embodiments, 2 or fewer modified nucleotides of the first nucleotide sequence are 2′-fluoro nucleotides. In some embodiments, at least one modified nucleotide of the first nucleotide sequence is a 2′-fluoro pyrimidine. In some embodiments, 1, 2, 3, 4, 5, or 6 modified nucleotides of the first nucleotide sequence are 2′-fluoro pyrimidines. In some embodiments, at least one modified nucleotide of the first nucleotide sequence is a 2′-fluoro purine. In some embodiments, 1, 2, 3, 4, 5, or 6 modified nucleotides of the first nucleotide sequence are 2′-fluoro purines. In some embodiments, the 2′-fluoro nucleotide is a 2′-fluoro nucleotide mimic.

[0155] In some embodiments, the nucleotide at position 3, 5, 7, 8, 9, 10, 11, 12, 14, 17, and/or 19 from the 5′ end of the first nucleotide sequence is a 2′-fluoro nucleotide. In some embodiments, at least two nucleotides at positions 3, 5, 7, 8, 9, 10, 11, 12, 14, 17, and/or 19 from the 5′ end of the first nucleotide sequence are 2′-fluoro nucleotides. In some embodiments, at least three nucleotides at positions 3, 5, 7, 8, 9, 10, 11, 12, 14, 17, and/or 19 from the 5′ end of the first nucleotide sequence are 2′-fluoro nucleotides. In some embodiments, at least four nucleotides at positions 3, 5, 7, 8, 9, 10, 11, 12, 14, 17, and/or 19 from the 5′ end of the first nucleotide sequence are 2′-fluoro nucleotides. In some embodiments, at least five nucleotides at positions 3, 5, 7, 8, 9, 10, 11, 12, 14, 17, and/or 19 from the 5′ end of the first nucleotide sequence are 2′-fluoro nucleotides. In some embodiments, the nucleotides at positions 3, 5, 7, 8, 9, 10, 11, 12, 14, 17, and/or 19 from the 5′ end of the first nucleotide sequence are 2′-fluoro nucleotides. In some embodiments, the nucleotide at position 3 from the 5′ end of the first nucleotide sequence is a 2′-fluoro nucleotide. In some embodiments, the nucleotide at position 7 from the 5′ end of the first nucleotide sequence is a 2′-fluoro nucleotide. In some embodiments, the nucleotide at position 8 from the 5′ end of the first nucleotide sequence is a 2′-fluoro nucleotide. In some embodiments, the nucleotide at position 9 from the 5′ end of the first nucleotide sequence is a 2′-fluoro nucleotide. In some embodiments, the nucleotide at position 12 from the 5′ end of the first nucleotide sequence is a 2′-fluoro nucleotide. In some embodiments, the nucleotide at position 17 from the 5′ end of the first nucleotide sequence is a 2′-fluoro nucleotide. In some embodiments, the 2′-fluoro nucleotide is a 2′-fluoro nucleotide mimic.

[0156] In some embodiments, at least 1, 2, 3, 4, 5, 6, or 7 nucleotides at position 3, 5, 7, 8, 9, 10, 11, 12, 14, 17, and/or 19 from the 5′ end of the first nucleotide sequence is a 2′-fluoro nucleotide. In some embodiments, the nucleotide at positions 3, 5, 7, 8, 9, 10, 11, 12, 14, 17, and/or 19 from the 5′ end of the first nucleotide sequence is a 2′-fluoro nucleotide. In some embodiments, at least two nucleotides at positions 3, 5, 7, 8, 9, 10, 11, 12, 14, 17, and/or 19 from the 5′ end of the first nucleotide sequence are 2′-fluoro nucleotides. In some embodiments, at least three nucleotides at positions 3, 5, 7, 8, 9, 10, 11, 12, 14, 17, and/or 19 from the 5′ end of the first nucleotide sequence are 2′-fluoro nucleotides. In some embodiments, the nucleotides at positions 3, 5, 7, 8, 9, 10, 11, 12, 14, 17, and/or 19 from the 5′ end of the first nucleotide sequence are 2′-fluoro nucleotides. In some embodiments, the nucleotide at position 3 from the 5′ end of the first nucleotide sequence is a 2′-fluoro nucleotide. In some embodiments, the nucleotide at position 5 from the 5′ end of the first nucleotide sequence is a 2′-fluoro nucleotide. In some embodiments, the nucleotide at position 7 from the 5′ end of the first nucleotide sequence is a 2′-fluoro nucleotide. In some embodiments, the nucleotide at position 8 from the 5′ end of the first nucleotide sequence is a 2′-fluoro nucleotide. In some embodiments, the nucleotide at position 9 from the 5′ end of the first nucleotide sequence is a 2′-fluoro nucleotide. In some embodiments, the nucleotide at position 10 from the 5′ end of the first nucleotide sequence is a 2′-fluoro nucleotide. In some embodiments, the nucleotide at position 11 from the 5′ end of the first nucleotide sequence is a 2′-fluoro nucleotide. In some embodiments, the nucleotide at position 12 from the 5′ end of the first nucleotide sequence is a 2′-fluoro nucleotide. In some embodiments, the nucleotide at position 14 from the 5′ end of the first nucleotide sequence is a 2′-fluoro nucleotide. In some embodiments, the nucleotide at position 17 from the 5′ end of the first nucleotide sequence is a 2′-fluoro nucleotide. In some embodiments, the nucleotide at position 19 from the 5′ end of the first nucleotide sequence is a 2′-fluoro nucleotide. In some embodiments, the nucleotide at position 3, 7, 8, 9, 12, and/or 17 from the 5′ end of the first nucleotide sequence is a 2′-fluoro nucleotide. In some embodiments, the nucleotide at position 3, 7, 8, and/or 17 from the 5′ end of the first nucleotide sequence is a 2′-fluoro nucleotide. In some embodiments, the nucleotide at position 3, 7, 8, 9, 12, and/or 17 from the 5′ end of the first nucleotide sequence is a 2′-fluoro nucleotide. In some embodiments, the nucleotide at position 5, 7, 8, and/or 9 from the 5′ end of the first nucleotide sequence is a 2′-fluoro nucleotide. In some embodiments, the nucleotide at position 5, 9, 10, 11, 12, and/or 19 from the 5′ end of the first nucleotide sequence is a 2′-fluoro nucleotide. In some embodiments, the 2′-fluoro nucleotide is a 2′-fluoro nucleotide mimic. The 2′-fluoro nucleotide mimic can be selected from

[chemical structure]

[0157] In some embodiments, the 2′-fluoro nucleotide or 2′-O-methyl nucleotide is a 2′-fluoro or 2′-O-methyl nucleotide mimic. In some embodiments, the 2′-fluoro or 2′-O-methyl nucleotide mimic is a nucleotide mimic of Formula (V):

[chemical structure]

wherein R¹ is a independently nucleobase, aryl, heteroaryl, or H, Q¹ and Q² are independently S or O, R⁵ is independently —OCD₃, —F, or —OCH₃, and R⁶ and R⁷ are independently H, D, or CD₃. In some embodiments, the nucleobase is selected from cytosine, guanine, adenine, uracil, aryl, heteroaryl, and an analogue or derivative thereof.

[0158] In some embodiments, the 2′-fluoro or 2′-O-methyl nucleotide mimic is a nucleotide mimic of Formula (16)-Formula (20):

[chemical structure]

wherein R¹ is independently a nucleobase and R² is F or —OCH₃. In some embodiments, the nucleobase is selected from cytosine, guanine, adenine, uracil, aryl, heteroaryl, and an analogue or derivative thereof.

[0159] In some embodiments, the first nucleotide sequence comprises, consists of, or consists essentially of ribonucleic acids (RNAs). In some embodiments, the first nucleotide sequence comprises, consists of, or consists essentially of modified RNAs. In some embodiments, the modified RNAs are selected from a 2′-O-methyl RNA and 2′-fluoro RNA. In some embodiments, 15, 16, 17, 18, 19, 20, 21, 22, or 23 modified nucleotides of the first nucleotide sequence are independently selected from 2′-O-methyl RNA and 2′-fluoro RNA.

[0160] In some embodiments, the sense strand may further comprise one or more internucleoside linkages independently selected from a phosphodiester (PO) internucleoside linkage, phosphorothioate (PS) internucleoside linkage, phosphorodithioate internucleoside linkage, and PS-mimic internucleoside linkage. In some embodiments, the PS-mimic internucleoside linkage is a sulfo internucleotide linkage.

[0161] In some embodiments, the sense strand may further comprise at least 1, 2, 3, 4, 5, 6, 7, 8, 9, 10, 11, 12, 13, 14, or 15 or more phosphorothioate internucleoside linkages. In some embodiments, the sense strand comprises 20, 19, 18, 17, 16, 15, 14, 13, 12, 11, 10, 9, 8, 7, 6, 5, 4, or 3 or fewer phosphorothioate internucleoside linkages. In some embodiments, the sense strand comprises 2 to 10, 2 to 8, 2 to 6, 1 to 5, 1 to 4, 1 to 3, or 1 to 2 phosphorothioate internucleoside linkages. In some embodiments, the sense strand comprises 1 to 2 phosphorothioate internucleoside linkages. In some embodiments, the sense strand comprises 2 to 4 phosphorothioate internucleoside linkages. In some embodiments, at least one phosphorothioate internucleoside linkage is between the nucleotides at positions 1 and 2 from the 5′ end of the first nucleotide sequence. In some embodiments, at least one phosphorothioate internucleoside linkage is between the nucleotides at positions 2 and 3 from the 5′ end of the first nucleotide sequence. In some embodiments, the sense strand comprises two phosphorothioate internucleoside linkages between the nucleotides at positions 1 to 3 from the 5′ end of the first nucleotide sequence.

[0162] In some embodiments, any of the sense strands disclosed herein may comprise a 5′ end cap monomer. In some embodiments, any of the first nucleotide sequences disclosed herein may comprise a 5′ end cap monomer.

[0163] B. siNA Antisense Strand

[0164] Any of the siNA molecules described herein may comprise an antisense strand. The antisense strand may comprise a second nucleotide sequence. The second nucleotide sequence may be 15 to 30, 15 to 25, 15 to 23, 17 to 23, 19 to 23, or 19 to 21 nucleotides in length. In some embodiments, the second nucleotide sequence is 15, 16, 17, 18, 19, 20, 21, 22, 23, 24, 25, 26, 27, 28, 29, or 30 nucleotides in length. In some embodiments, the second nucleotide sequence is at least 19 nucleotides in length. In some embodiments, the second nucleotide sequence is at least 21 nucleotides in length.

[0165] In some embodiments, the antisense strand is the same length as the second nucleotide sequence. In some embodiments, the antisense strand is longer than the second nucleotide sequence. In some embodiments, the antisense strand may further comprise 1, 2, 3, 4, or 5 or more nucleotides than the second nucleotide sequence. In some embodiments, the antisense strand is the same length as the sense strand. In some embodiments, the antisense strand is longer than the sense strand. In some embodiments, the antisense strand may further comprise 1, 2, 3, 4, or 5 or more nucleotides than the sense strand. In some embodiments, the antisense strand may further comprise a deoxyribonucleic acid (DNA). In some embodiments, the DNA is thymine (T). In some embodiments, the antisense strand may further comprise a TT sequence. In some embodiments, the antisense strand may further comprise one or more modified nucleotides that are adjacent to the second nucleotide sequence. In some embodiments, the one or more modified nucleotides are independently selected from any of the modified nucleotides disclosed herein (e.g., 2′-fluoro nucleotide, 2′-O-methyl nucleotide, 2′-fluoro nucleotide mimic, 2′-O-methyl nucleotide mimic, or a nucleotide comprising a modified nucleobase).

[0166] In some embodiments, the second nucleotide sequence comprises 15, 16, 17, 18, 19, 20, 21, 22, 23, or more modified nucleotides independently selected from a 2′-O-methyl nucleotide and a 2′-fluoro nucleotide. In some embodiments, 70%, 75%, 80%, 85%, 90%, 95% or 100% of the nucleotides in the second nucleotide sequence are modified nucleotides independently selected from a 2′-O-methyl nucleotide and a 2′-fluoro nucleotide. In some embodiments, 100% of the nucleotides in the second nucleotide sequence are modified nucleotides independently selected from a 2′-O-methyl nucleotide and a 2′-fluoro nucleotide.

[0167] In some embodiments, between about 15 to 30, 15 to 25, 15 to 24, 15 to 23, 15 to 22, 15 to 21, 17 to 30, 17 to 25, 17 to 24, 17 to 23, 17 to 22, 17 to 21, 18 to 30, 18 to 25, 18 to 24, 18 to 23, 18 to 22, 18 to 21, 19 to 30, 19 to 25, 19 to 24, 19 to 23, 19 to 22, 19 to 21, 20 to 25, 20 to 24, 20 to 23, 21 to 25, 21 to 24, or 21 to 23 modified nucleotides of the second nucleotide sequence are 2′-O-methyl nucleotides. In some embodiments, between about 2 to 20 modified nucleotides of the second nucleotide sequence are 2′-O-methyl nucleotides. In some embodiments, between about 5 to 25 modified nucleotides of the second nucleotide sequence are 2′-O-methyl nucleotides. In some embodiments, between about 10 to 25 modified nucleotides of the second nucleotide sequence are 2′-O-methyl nucleotides. In some embodiments, between about 12 to 25 modified nucleotides of the second nucleotide sequence are 2′-O-methyl nucleotides. In some embodiments, at least 10, 11, 12, 13, 14, 15, 16, 17, 18, 19, 20, 21, or 22 modified nucleotides of the second nucleotide sequence are 2′-O-methyl nucleotides. In some embodiments, at least about 12 modified nucleotides of the second nucleotide sequence are 2′-O-methyl nucleotides. In some embodiments, at least about 13 modified nucleotides of the second nucleotide sequence are 2′-O-methyl nucleotides. In some embodiments, at least about 14 modified nucleotides of the second nucleotide sequence are 2′-O-methyl nucleotides. In some embodiments, at least about 15 modified nucleotides of the second nucleotide sequence are 2′-O-methyl nucleotides. In some embodiments, at least about 16 modified nucleotides of the second nucleotide sequence are 2′-O-methyl nucleotides. In some embodiments, at least about 17 modified nucleotides of the second nucleotide sequence are 2′-O-methyl nucleotides. In some embodiments, at least about 18 modified nucleotides of the second nucleotide sequence are 2′-O-methyl nucleotides. In some embodiments, at least about 19 modified nucleotides of the second nucleotide sequence are 2′-O-methyl nucleotides. In some embodiments, less than or equal to 25, 24, 23, 22, 21, 20, 19, 18, 17, 16, 15, 14, 13, 12, 11, 10, 9, 8, 7, 6, 5, 4, 3, or 2 modified nucleotides of the second nucleotide sequence are 2′-O-methyl nucleotides. In some embodiments, less than or equal to 21 modified nucleotides of the second nucleotide sequence are 2′-O-methyl nucleotides. In some embodiments, less than or equal to 20 modified nucleotides of the second nucleotide sequence are 2′-O-methyl nucleotides. In some embodiments, less than or equal to 19 modified nucleotides of the second nucleotide sequence are 2′-O-methyl nucleotides. In some embodiments, less than or equal to 18 modified nucleotides of the second nucleotide sequence are 2′-O-methyl nucleotides. In some embodiments, less than or equal to 17 modified nucleotides of the second nucleotide sequence are 2′-O-methyl nucleotides. In some embodiments, less than or equal to 16 modified nucleotides of the second nucleotide sequence are 2′-O-methyl nucleotides. In some embodiments, less than or equal to 15 modified nucleotides of the second nucleotide sequence are 2′-O-methyl nucleotides. In some embodiments, less than or equal to 14 modified nucleotides of the second nucleotide sequence are 2′-O-methyl nucleotides. In some embodiments, less than or equal to 13 modified nucleotides of the second nucleotide sequence are 2′-O-methyl nucleotides. In some embodiments, at least one modified nucleotide of the second nucleotide sequence is a 2′-O-methyl pyrimidine. In some embodiments, at least 5, 6, 7, 8, 9, or 10 modified nucleotides of the second nucleotide sequence are 2′-O-methyl pyrimidines. In some embodiments, at least one modified nucleotide of the second nucleotide sequence is a 2′-O-methyl purine. In some embodiments, at least 5, 6, 7, 8, 9, or 10 modified nucleotides of the second nucleotide sequence are 2′-O-methyl purines. In some embodiments, the 2′-O-methyl nucleotide is a 2′-O-methyl nucleotide mimic.

[0168] In some embodiments, between 2 to 15 modified nucleotides of the second nucleotide sequence are 2′-fluoro nucleotides. In some embodiments, between 2 to 10 modified nucleotides of the second nucleotide sequence are 2′-fluoro nucleotides. In some embodiments, between 2 to 6 modified nucleotides of the second nucleotide sequence are 2′-fluoro nucleotides. In some embodiments, 1 to 6, 1 to 5, 1 to 4, or 1 to 3 modified nucleotides of the second nucleotide sequence are 2′-fluoro nucleotides. In some embodiments, at least 1, 2, 3, 4, 5, or 6 modified nucleotides of the second nucleotide sequence are 2′-fluoro nucleotides. In some embodiments, at least 1 modified nucleotide of the second nucleotide sequence is a 2′-fluoro nucleotide. In some embodiments, at least 2 modified nucleotides of the second nucleotide sequence are 2′-fluoro nucleotides. In some embodiments, at least 3 modified nucleotides of the second nucleotide sequence are 2′-fluoro nucleotides. In some embodiments, at least 4 modified nucleotides of the second nucleotide sequence are 2′-fluoro nucleotides. In some embodiments, at least 5 modified nucleotides of the second nucleotide sequence are 2′-fluoro nucleotides. In some embodiments, 10, 9, 8, 7, 6, 5, 4, 3 or fewer modified nucleotides of the second nucleotide sequence are 2′-fluoro nucleotides. In some embodiments, 10 or fewer modified nucleotides of the second nucleotide sequence are 2′-fluoro nucleotides. In some embodiments, 7 or fewer modified nucleotides of the second nucleotide sequence are 2′-fluoro nucleotides. In some embodiments, 6 or fewer modified nucleotides of the second nucleotide sequence are 2′-fluoro nucleotides. In some embodiments, 5 or fewer modified nucleotides of the second nucleotide sequence are 2′-fluoro nucleotides. In some embodiments, 4 or fewer modified nucleotides of the second nucleotide sequence are 2′-fluoro nucleotides. In some embodiments, 3 or fewer modified nucleotides of the second nucleotide sequence are 2′-fluoro nucleotides. In some embodiments, 2 or fewer modified nucleotides of the second nucleotide sequence are 2′-fluoro nucleotides. In some embodiments, at least one modified nucleotide of the second nucleotide sequence is a 2′-fluoro pyrimidine. In some embodiments, 1, 2, 3, 4, 5, or 6 modified nucleotides of the second nucleotide sequence are 2′-fluoro pyrimidines. In some embodiments, at least one modified nucleotide of the second nucleotide sequence is a 2′-fluoro purine. In some embodiments, 1, 2, 3, 4, 5, or 6 modified nucleotides of the second nucleotide sequence are 2′-fluoro purines. In some embodiments, the 2′-fluoro nucleotide is a 2′-fluoro nucleotide mimic. The 2′-fluoro nucleotide mimic can be selected from

[chemical structure]

[0169] In some embodiments, the 2′-fluoro nucleotide or 2′-O-methyl nucleotide is a 2′-fluoro or 2′-O-methyl nucleotide mimic. In some embodiments, the 2′-fluoro or 2′-O-methyl nucleotide mimic is a nucleotide mimic of Formula (V):

[chemical structure]

wherein R¹ is independently a nucleobase, aryl, heteroaryl, or H, Q¹ and Q² are independently S or O, R⁵ is independently —OCD₃, —F, or —OCH₃, and R⁶ and R⁷ are independently H, D, or CD₃. In some embodiments, the nucleobase is selected from cytosine, guanine, adenine, uracil, aryl, heteroaryl, and an analogue or derivative thereof.

[0170] In some embodiments, the 2′-fluoro or 2′-O-methyl nucleotide mimic is a nucleotide mimic of Formula (16)-Formula (20):

[chemical structure]

wherein R¹ is a nucleobase and R² is independently F or —OCH₃. In some embodiments, the nucleobase is selected from cytosine, guanine, adenine, uracil, aryl, heteroaryl, and an analogue or derivative thereof.

[0171] In some embodiments, at least 1, 2, 3, 4, 5, 6, 7, 8, or 9 nucleotides at position 2, 5, 6, 8, 10, 14, 16, 17, and/or 18 from the 5′ end of the second nucleotide sequence is a 2′-fluoro nucleotide. In some embodiments, the nucleotide at position 2, 5, 6, 8, 10, 14, 16, 17, and/or 18 from the 5′ end of the second nucleotide sequence is a 2′-fluoro nucleotide. In some embodiments, at least two nucleotides at positions 2, 5, 6, 8, 10, 14, 16, 17, and/or 18 from the 5′ end of the second nucleotide sequence are 2′-fluoro nucleotides. In some embodiments, at least three nucleotides at positions 2, 5, 6, 8, 10, 14, 16, 17, and/or 18 from the 5′ end of the second nucleotide sequence are 2′-fluoro nucleotides. In some embodiments, at least four nucleotides at positions 2, 5, 6, 8, 10, 14, 16, 17, and/or 18 from the 5′ end of the second nucleotide sequence are 2′-fluoro nucleotides. In some embodiments, at least five nucleotides at positions 2, 5, 6, 8, 10, 14, 16, 17, and/or 18 from the 5′ end of the second nucleotide sequence are 2′-fluoro nucleotides. In some embodiments, the nucleotides at positions 2 and/or 14 from the 5′ end of the second nucleotide sequence are 2′-fluoro nucleotides. In some embodiments, the nucleotides at positions 2, 6, and/or 16 from the 5′ end of the second nucleotide sequence are 2′-fluoro nucleotides. In some embodiments, the nucleotides at positions 2, 6, 14, and/or 16 from the 5′ end of the second nucleotide sequence are 2′-fluoro nucleotides. In some embodiments, the nucleotides at positions 2, 6, 10, 14, and/or 18 from the 5′ end of the second nucleotide sequence are 2′-fluoro nucleotides. In some embodiments, the nucleotides at positions 2, 5, 8, 14, and/or 17 from the 5′ end of the second nucleotide sequence are 2′-fluoro nucleotides. In some embodiments, the nucleotide at position 2 from the 5′ end of the second nucleotide sequence is a 2′-fluoro nucleotide. In some embodiments, the nucleotide at position 5 from the 5′ end of the second nucleotide sequence is a 2′-fluoro nucleotide. In some embodiments, the nucleotide at position 6 from the 5′ end of the second nucleotide sequence is a 2′-fluoro nucleotide. In some embodiments, the nucleotide at position 8 from the 5′ end of the second nucleotide sequence is a 2′-fluoro nucleotide. In some embodiments, the nucleotide at position 10 from the 5′ end of the second nucleotide sequence is a 2′-fluoro nucleotide. In some embodiments, the nucleotide at position 14 from the 5′ end of the second nucleotide sequence is a 2′-fluoro nucleotide. In some embodiments, the nucleotide at position 16 from the 5′ end of the second nucleotide sequence is a 2′-fluoro nucleotide. In some embodiments, the nucleotide at position 17 from the 5′ end of the second nucleotide sequence is a 2′-fluoro nucleotide. In some embodiments, the nucleotide at position 18 from the 5′ end of the second nucleotide sequence is a 2′-fluoro nucleotide. In some embodiments, the 2′-fluoro nucleotide is a 2′-fluoro nucleotide mimic. The 2′-fluoro nucleotide mimic can be selected from

[chemical structure]

[0172] In some embodiments, the nucleotides in the second nucleotide sequence are arranged in an alternating 1:3 modification pattern, wherein 1 nucleotide is a 2′-fluoro nucleotide and 3 nucleotides are 2′-O-methyl nucleotides, and wherein the alternating 1:3 modification pattern occurs at least 2 times. In some embodiments, the alternating 1:3 modification pattern occurs 2-5 times. In some embodiments, at least two of the alternating 1:3 modification pattern occur consecutively. In some embodiments, at least two of the alternating 1:3 modification pattern occurs nonconsecutively. In some embodiments, at least 1, 2, 3, 4, or 5 alternating 1:3 modification pattern begins at nucleotide position 2, 6, 10, 14, and/or 18 from the 5′ end of the antisense strand. In some embodiments, at least one alternating 1:3 modification pattern begins at nucleotide position 2 from the 5′ end of the antisense strand. In some embodiments, wherein at least one alternating 1:3 modification pattern begins at nucleotide position 6 from the 5′ end of the antisense strand. In some embodiments, at least one alternating 1:3 modification pattern begins at nucleotide position 10 from the 5′ end of the antisense strand. In some embodiments, at least one alternating 1:3 modification pattern begins at nucleotide position 14 from the 5′ end of the antisense strand. In some embodiments, at least one alternating 1:3 modification pattern begins at nucleotide position 18 from the 5′ end of the antisense strand. In some embodiments, the 2′-fluoro nucleotide is a 2′-fluoro nucleotide mimic. The 2′-fluoro nucleotide mimic can be selected from

[chemical structure]

[0173] In some embodiments, the nucleotides in the second nucleotide sequence are arranged in an alternating 1:2 modification pattern, wherein 1 nucleotide is a 2′-fluoro nucleotide and 2 nucleotides are 2′-O-methyl nucleotides, and wherein the alternating 1:2 modification pattern occurs at least 2 times. In some embodiments, the alternating 1:2 modification pattern occurs 2-5 times. In some embodiments, at least two of the alternating 1:2 modification pattern occurs consecutively. In some embodiments, at least two of the alternating 1:2 modification pattern occurs nonconsecutively. In some embodiments, at least 1, 2, 3, 4, or 5 alternating 1:2 modification pattern begins at nucleotide position 2, 5, 8, 14, and/or 17 from the 5′ end of the antisense strand. In some embodiments, at least one alternating 1:2 modification pattern begins at nucleotide position 2 from the 5′ end of the antisense strand. In some embodiments, at least one alternating 1:2 modification pattern begins at nucleotide position 5 from the 5′ end of the antisense strand. In some embodiments, at least one alternating 1:2 modification pattern begins at nucleotide position 8 from the 5′ end of the antisense strand. In some embodiments, at least one alternating 1:2 modification pattern begins at nucleotide position 14 from the 5′ end of the antisense strand. In some embodiments, at least one alternating 1:2 modification pattern begins at nucleotide position 17 from the 5′ end of the antisense strand. In some embodiments, the 2′-fluoro nucleotide is a 2′-fluoro nucleotide mimic. The 2′-fluoro nucleotide mimic can be selected from

[chemical structure]

[0174] In some embodiments, the second nucleotide sequence comprises, consists of, or consists essentially of ribonucleic acids (RNAs). In some embodiments, the second nucleotide sequence comprises, consists of, or consists essentially of modified RNAs. In some embodiments, the modified RNAs are selected from a 2′-O-methyl RNA and 2′-fluoro RNA. In some embodiments, 15, 16, 17, 18, 19, 20, 21, 22, or 23 modified nucleotides of the second nucleotide sequence are independently selected from 2′-O-methyl RNA and 2′-fluoro RNA. In some embodiments, the 2′-fluoro nucleotide is a 2′-fluoro nucleotide mimic. The 2′-fluoro nucleotide mimic can be selected from

[chemical structure]

[0175] In some embodiments, the sense strand may further comprise one or more internucleotide linkages independently selected from a phosphodiester (PO) internucleoside linkage, phosphorothioate (PS) internucleoside linkage, phosphorodithioate internucleoside linkage, and PS-mimic internucleoside linkage. In some embodiments, the PS-mimic internucleoside linkage is a sulfo internucleotide linkage.

[0176] In some embodiments, the antisense strand may further comprise at least 1, 2, 3, 4, 5, 6, 7, 8, 9, 10, 11, 12, 13, 14, or 15 or more phosphorothioate internucleoside linkages. In some embodiments, the antisense strand comprises 20, 19, 18, 17, 16, 15, 14, 13, 12, 11, 10, 9, 8, 7, 6, 5, 4, or 3 or fewer phosphorothioate internucleoside linkages. In some embodiments, the antisense strand comprises 2 to 10, 2 to 8, 2 to 6, 1 to 5, 1 to 4, 1 to 3, or 1 to 2 phosphorothioate internucleoside linkages. In some embodiments, the antisense strand comprises 2 to 10, 2 to 8, 2 to 6, 1 to 5, 1 to 4, 1 to 3, or 1 to 2 phosphorothioate internucleoside linkages. In some embodiments, the antisense strand comprises 2 to 8 phosphorothioate internucleoside linkages. In some embodiments, the antisense strand comprises 3 to 8 phosphorothioate internucleoside linkages. In some embodiments, the antisense strand comprises 4 to 8 phosphorothioate internucleoside linkages. In some embodiments, at least one phosphorothioate internucleoside linkage is between the nucleotides at positions 1 and 2 from the 5′ end of the second nucleotide sequence. In some embodiments, at least one phosphorothioate internucleoside linkage is between the nucleotides at positions 2 and 3 from the 5′ end of the second nucleotide sequence.

[0177] In some embodiments, at least one phosphorothioate internucleoside linkage is between the nucleotides at positions 1 and 2 from the 3′ end of the second nucleotide sequence. In some embodiments, at least one phosphorothioate internucleoside linkage is between the nucleotides at positions 2 and 3 from the 3′ end of the second nucleotide sequence. In some embodiments, the antisense strand comprises two phosphorothioate internucleoside linkages between the nucleotides at positions 1 to 3 from the 5′ end of the first nucleotide sequence. In some embodiments, the antisense strand comprises two phosphorothioate internucleoside linkages between the nucleotides at positions 1 to 3 from the 3′ end of the first nucleotide sequence. In some embodiments, the antisense strand comprises (a) two phosphorothioate internucleoside linkages between the nucleotides at positions 1 to 3 from the 5′ end of the first nucleotide sequence; and (b) two phosphorothioate internucleoside linkages between the nucleotides at positions 1 to 3 from the 3′ end of the first nucleotide sequence.

[0178] In some embodiments, at least one end of the ds-siNA is a blunt end. In some embodiments, at least one end of the ds-siNA comprises an overhang, wherein the overhang comprises at least one nucleotide. In some embodiments, both ends of the ds-siNA comprise an overhang, wherein the overhang comprises at least one nucleotide. In some embodiments, the overhang comprises 1 to 5 nucleotides, 1 to 4 nucleotides, 1 to 3 nucleotides, or 1 to 2 nucleotides. In some embodiments, the overhang consists of 1 to 2 nucleotides.

[0179] In some embodiments, any of the antisense strands disclosed herein may comprise a 5′ end cap monomer. In some embodiments, any of the second nucleotide sequences disclosed herein may comprise a 5′ end cap monomer.

### Modified Nucleotides

[0180] Further disclosed herein are siNA molecules comprising one or more modified nucleotides. In some embodiments, any of the siNAs disclosed herein comprise one or more modified nucleotides. In some embodiments, any of the sense strands disclosed herein comprise one or more modified nucleotides. In some embodiments, any of the first nucleotide sequences disclosed herein comprise one or more modified nucleotides. In some embodiments, any of the antisense strands disclosed herein comprise one or more modified nucleotides. In some embodiments, any of the second nucleotide sequences disclosed herein comprise one or more modified nucleotides. In some embodiments, the one or more modified nucleotides is adjacent to the first nucleotide sequence. In some embodiments, at least one modified nucleotide is adjacent to the 5′ end of the first nucleotide sequence. In some embodiments, at least one modified nucleotide is adjacent to the 3′ end of the first nucleotide sequence. In some embodiments, at least one modified nucleotide is adjacent to the 5′ end of the first nucleotide sequence and at least one modified nucleotide is adjacent to the 3′ end of the first nucleotide sequence. In some embodiments, the one or more modified nucleotides is adjacent to the second nucleotide sequence. In some embodiments, at least one modified nucleotide is adjacent to the 5′ end of the second nucleotide sequence. In some embodiments, at least one modified nucleotide is adjacent to the 3′ end of the second nucleotide sequence. In some embodiments, at least one modified nucleotide is adjacent to the 5′ end of the second nucleotide sequence and at least one modified nucleotide is adjacent to the 3′ end of the second nucleotide sequence. In some embodiments, a 2′-O-methyl nucleotide in any of sense strands or first nucleotide sequences disclosed herein is replaced with a modified nucleotide. In some embodiments, a 2′-O-methyl nucleotide in any of antisense strands or second nucleotide sequences disclosed herein is replaced with a modified nucleotide.

[0181] In some embodiments, any of the siNA molecules, siNAs, sense strands, first nucleotide sequences, antisense strands, and second nucleotide sequences disclosed herein comprise 1, 2, 3, 4, 5, 6, 7, 8, 9, 10, 11, 12, 13, 14, 15, 16, 17, 18, 19, 20, 21, 22, 23, 24, 25, 26, 27, 28, 29, or 30 or more modified nucleotides. In some embodiments, 1%, 2%, 3%, 4%, 5%, 10%, 15%, 20%, 25%, 30%, 35%, 40%, 45%, 50%, 55%, 60%, 70%, 75%, 80%, 85%, 86%, 87%, 88%, 90%, 91%, 92%, 93%, 94%, 95%, 96%, 97%, 98%, 99% or 100% of the nucleotides in the siNA molecule, siNA, sense strand, first nucleotide sequence, antisense strand, or second nucleotide sequence are modified nucleotides.

[0182] In some embodiments, a modified nucleotide is selected from the group consisting of 2′-fluoro nucleotide, 2′-O-methyl nucleotide, 2′-fluoro nucleotide mimic, 2′-O-methyl nucleotide mimic, a locked nucleic acid, and a nucleotide comprising a modified nucleobase.

[0183] In some embodiments, any of the siRNAs disclosed herein comprise at least 1, 2, 3, 4, 5, 6, 7, 8, 9, or 10 or more 2′-fluoro or 2′-O-methyl nucleotide mimics. In some embodiments, any of the sense strands disclosed herein comprise at least 1, 2, 3, 4, 5, 6, 7, 8, 9, or 10 or more 2′-fluoro or 2′-O-methyl nucleotide mimics. In some embodiments, any of the first nucleotide sequences disclosed herein comprise at least 1, 2, 3, 4, 5, 6, 7, 8, 9, or 10 or more 2′-fluoro or 2′-O-methyl nucleotide mimics. In some embodiments, any of the antisense strand disclosed herein comprise at least 1, 2, 3, 4, 5, 6, 7, 8, 9, or 10 or more 2′-fluoro or 2′-O-methyl nucleotide mimics. In some embodiments, any of the second nucleotide sequences disclosed herein comprise at least 1, 2, 3, 4, 5, 6, 7, 8, 9, or 10 or more 2′-fluoro or 2′-O-methyl nucleotide mimics. In some embodiments, the 2′-fluoro or 2′-O-methyl nucleotide mimic is a nucleotide mimic of Formula (16)-Formula (20):

[chemical structure]

wherein R¹ is a nucleobase and R¹ is independently F or —OCH₃. In some embodiments, the nucleobase is selected from cytosine, guanine, adenine, uracil, aryl, heteroaryl, and an analogue or derivative thereof.

[0184] In some embodiments, the siNA molecules disclosed herein comprise at least one 2′-fluoro nucleotide, at least one 2′-O-methyl nucleotide, and at least one 2′-fluoro or 2′-O-methyl nucleotide mimic. In some embodiments, the at least one 2′-fluoro or 2′-O-methyl nucleotide mimic is adjacent to the first nucleotide sequence. In some embodiments, the at least one 2′-fluoro or 2′-O-methyl nucleotide mimic is adjacent to the 5′ end of first nucleotide sequence. In some embodiments, the at least one 2′-fluoro or 2′-O-methyl nucleotide mimic is adjacent to the 3′ end of first nucleotide sequence. In some embodiments, the at least one 2′-fluoro or 2′-O-methyl nucleotide mimic is adjacent to the second nucleotide sequence. In some embodiments, the at least one 2′-fluoro or 2′-O-methyl nucleotide mimic is adjacent to the 5′ end of second nucleotide sequence. In some embodiments, the at least one 2′-fluoro or 2′-O-methyl nucleotide mimic is adjacent to the 3′ end of second nucleotide sequence. In some embodiments, the first nucleotide sequence does not comprise a 2′-fluoro nucleotide mimic. In some embodiments, the first nucleotide sequence does not comprise a 2′-O-methyl nucleotide mimic. In some embodiments, the second nucleotide sequence does not comprise a 2′-fluoro nucleotide mimic. In some embodiments, the second nucleotide sequence does not comprise a 2′-O-methyl nucleotide mimic.

[0185] In some embodiments, any of the siRNAs disclosed herein comprise at least 1, 2, 3, 4, 5, 6, 7, 8, 9, or 10 or more locked nucleic acids. In some embodiments, any of the sense strands disclosed herein comprise at least 1, 2, 3, 4, 5, 6, 7, 8, 9, or 10 or more locked nucleic acids. In some embodiments, any of the first nucleotide sequences disclosed herein comprise at least 1, 2, 3, 4, 5, 6, 7, 8, 9, or 10 or more locked nucleic acids. In some embodiments, any of the antisense strand disclosed herein comprise at least 1, 2, 3, 4, 5, 6, 7, 8, 9, or 10 or more locked nucleic acids. In some embodiments, any of the second nucleotide sequences disclosed herein comprise at least 1, 2, 3, 4, 5, 6, 7, 8, 9, or 10 or more locked nucleic acids. In some embodiments, the locked nucleic acid is selected from

[chemical structure]

where R is H or alkyl (or AmNA(N-Me)) when R is alkyl);

[chemical structure]

wherein B is a nucleobase. In some embodiments, any of the siRNAs, sense strands, first nucleotide sequences, antisense strands, or second nucleotide sequences disclosed herein comprise at least modified nucleotide that is

[chemical structure]

In some embodiments, any of the siRNAs, sense strands, first nucleotide sequences, antisense strands, or second nucleotide sequences disclosed herein comprise at least modified nucleotide that is

[chemical structure]

In some embodiments, any of the siRNAs, sense strands, first nucleotide sequences, antisense strands, or second nucleotide sequences disclosed herein comprise at least modified nucleotide that is

[chemical structure]

where R is H or alkyl (or AmNA(N-Me)) when R is alkyl). In some embodiments, any of the siRNAs, sense strands, first nucleotide sequences, antisense strands, or second nucleotide sequences disclosed herein comprise at least modified nucleotide that is

[chemical structure]

In some embodiments, any of the siRNAs, sense strands, first nucleotide sequences, antisense strands, or second nucleotide sequences disclosed herein comprise at least modified nucleotide that is

[chemical structure]

wherein B is a nucleobase.

### Phosphorylation Blocker

[0186] Further disclosed herein are siNA molecules comprising a phosphorylation blocker. In some embodiments, a 2′-O-methyl nucleotide in any of sense strands or first nucleotide sequences disclosed herein is replaced with a nucleotide containing a phosphorylation blocker. In some embodiments, a 2′-O-methyl nucleotide in any of antisense strands or second nucleotide sequences disclosed herein is replaced with a nucleotide containing a phosphorylation blocker. In some embodiments, a 2′-O-methyl nucleotide in any of sense strands or first nucleotide sequences disclosed herein is further modified to contain a phosphorylation blocker. In some embodiments, a 2′-O-methyl nucleotide in any of antisense strands or second nucleotide sequences disclosed herein is further modified to contain a phosphorylation blocker.

[0187] In some embodiments, any of the siNA molecules disclosed herein comprise a phosphorylation blocker of Formula (IV):

[chemical structure]

wherein R¹ is a nucleobase, R⁴ is —O—R³⁰ or —NR³¹R³², R³⁰ is C₁-C₈ substituted or unsubstituted alkyl; and R³¹ and R³² together with the nitrogen to which they are attached form a substituted or unsubstituted heterocyclic ring.

[0188] In some embodiments, any of the siNA molecules disclosed herein comprise a phosphorylation blocker of Formula (IV):

[chemical structure]

wherein R¹ is a nucleobase, and R⁴ is —OCH₃ or —N(CH₂CH₂)₂O.

[0189] In some embodiments, a siNA molecule comprises (a) a phosphorylation blocker of Formula (IV):

[chemical structure]

wherein R¹ is a nucleobase, R⁴ is —O—R³⁰ or —NR³¹R³², R³⁰ is C₁-C₈ substituted or unsubstituted alkyl; and R³¹ and R³² together with the nitrogen to which they are attached form a substituted or unsubstituted heterocyclic ring; and (b) a siNA, wherein the phosphorylation blocker is conjugated to the siNA.

[0190] In some embodiments, a siNA molecule comprises (a) a phosphorylation blocker of Formula (IV):

[chemical structure]

wherein R¹ is a nucleobase, and R⁴ is —OCH₃ or —N(CH₂CH₂)₂O; and (b) siNA, wherein the phosphorylation blocker is conjugated to the siNA.

[0191] In some embodiments, the phosphorylation blocker is attached to the 3′ end of the sense strand or first nucleotide sequence. In some embodiments, the phosphorylation blocker is attached to the 3′ end of the sense strand or first nucleotide sequence via 1, 2, 3, 4, or 5 or more linkers. In some embodiments, the phosphorylation blocker is attached to the 5′ end of the sense strand or first nucleotide sequence. In some embodiments, the phosphorylation blocker is attached to the 5′ end of the sense strand or first nucleotide sequence via 1, 2, 3, 4, or 5 or more linkers. In some embodiments, the phosphorylation blocker is attached to the 3′ end of the antisense strand or second nucleotide sequence. In some embodiments, the phosphorylation blocker is attached to the 3′ end of the antisense strand or second nucleotide sequence via 1, 2, 3, 4, or 5 or more linkers. In some embodiments, the phosphorylation blocker is attached to the 5′ end of the antisense strand or second nucleotide sequence. In some embodiments, the phosphorylation blocker is attached to the 5′ end of the antisense strand or second nucleotide sequence via 1, 2, 3, 4, or 5 or more linkers. In some embodiments, the one or more linkers are independently selected from the group consisting of a phosphodiester linker, phosphorothioate linker, and phosphorodithioate linker.

### 5′-Stabilized End Cap

[0192] Further disclosed herein are siNA molecules comprising a 5′-stabilized end cap. As used herein the terms “5′-stabilized end cap” and “5′ end cap” are used interchangeably. In some embodiments, a 2′-O-methyl nucleotide in any of sense strands or first nucleotide sequences disclosed herein is replaced with a nucleotide containing a 5′-stabilized end cap. In some embodiments, a 2′-O-methyl nucleotide in any of antisense strands or second nucleotide sequences disclosed herein is replaced with a nucleotide containing a 5′-stabilized end cap. In some embodiments, a 2′-O-methyl nucleotide in any of sense strands or first nucleotide sequences disclosed herein is further modified to contain a 5′-stabilized end cap. In some embodiments, a 2′-O-methyl nucleotide in any of antisense strands or second nucleotide sequences disclosed herein is further modified to contain a 5′-stabilized end cap.

[0193] In some embodiments, the 5′-stabilized end cap is a 5′ phosphate mimic. In some embodiments, the 5′-stabilized end cap is a modified 5′ phosphate mimic. In some embodiments, the modified 5′ phosphate is a chemically modified 5′ phosphate. In some embodiments, the 5′-stabilized end cap is a 5′-vinyl phosphonate. In some embodiments, the 5′-vinyl phosphonate is a 5′-(E)-vinyl phosphonate or 5′-(Z)-vinyl phosphonate. In some embodiments, the 5′-vinylphosphonate is a deuterated vinyl phosphonate. In some embodiments, the deuterated vinyl phosphonate is a mono-deuterated vinyl phosphonate. In some embodiments, the deuterated vinyl phosphonate is a di-deuterated vinyl phosphonate. In some embodiments, the 5′-stabilized end cap is a phosphate mimic. Examples of phosphate mimics are disclosed in Parmar et al., 2018, J Med Chem, 61(3):734-744, International Publication Nos. WO2018/045317 and WO2018/044350, and U.S. Pat. No. 10,087,210, each of which is incorporated by reference in its entirety.

[0194] In some embodiments, any of the siNA molecules, sense strands, first nucleotide sequences, antisense strands, or second nucleotide sequences disclosed herein comprise a 5′-stabilized end cap of Formula (Ia):

[chemical structure]

wherein R¹ is H, a nucleobase, aryl, or heteroaryl; R² is

[chemical structure]

—CH═CD-Z, —CD=CH—Z, —CD=CD-Z, —(CR²¹R²²)ₙ—Z, or —(C₂-C₆ alkenylene)-Z and R²⁰ is H; or R² and R²⁰ together form a 3- to 7-membered carbocyclic ring substituted with —(CR²¹R²²)ₙ—Z or —(C₂-C₆ alkenylene)-Z; n is 1, 2, 3, or 4; Z is —ONR²³R²⁴, —OP(O)OH(CH₂)ₘCO₂R²³, —OP(S)OH(CH₂)ₘCO₂R²³, —P(O)(OH)₂, —P(O)(OH)(OCH₃), —P(O)(OH)(OCD₃), —SO₂(CH₂)ₘP(O)(OH)₂, —SO₂NR²³R²⁵, —NR²³R²⁴, —NR²³ SO₂R²⁵; either R²¹ and R²² are independently hydrogen or C₁-C₆ alkyl, or R²¹ and R²² together form an oxo group; R²³ is hydrogen or C₁-C₆ alkyl; R²⁴ is —SO₂R²⁵ or —C(O)R²⁵; or R²³ and R²⁴ together with the nitrogen to which they are attached form a substituted or unsubstituted heterocyclic ring; R²⁵ is C₁-C₆ alkyl; and m is 1, 2, 3, or 4. In some embodiments, R¹ is an aryl. In some embodiments, the aryl is a phenyl.

[0195] In some embodiments, any of the siNA molecules, sense strands, first nucleotide sequences, antisense strands, or second nucleotide sequences disclosed herein comprise a 5′-stabilized end cap of Formula (Ib):

[chemical structure]

wherein R¹ is H, a nucleobase, aryl, or heteroaryl; R² is

[chemical structure]

—CH═CD-Z, —CD=CH—Z, —CD=CD-Z, —(CR²¹R²²)ₙ—Z, or —(C₂-C₆ alkenylene)-Z and R²⁰ is H; or R² and R²⁰ together form a 3- to 7-membered carbocyclic ring substituted with —(CR²¹R²²)ₙ—Z or —(C₂-C₆ alkenylene)-Z; n is 1, 2, 3, or 4; Z is —ONR²³R²⁴, —OP(O)OH(CH₂)ₘCO₂R²³, —OP(S)OH(CH₂)ₘCO₂R²³, —P(O)(OH)₂, —P(O)(OH)(OCH₃), —P(O)(OH)(OCD₃), —SO₂(CH₂)ₘP(O)(OH)₂, —SO₂NR²³R²⁵, —NR²³R²⁴, —NR²³SO₂R²⁵; either R²¹ and R²² are independently hydrogen or C₁-C₆ alkyl, or R²¹ and R²² together form an oxo group; R²³ is hydrogen or C₁-C₆ alkyl; R²⁴ is —SO₂R²⁵ or —C(O)R²⁵; or R²³ and R²⁴ together with the nitrogen to which they are attached form a substituted or unsubstituted heterocyclic ring; R²⁵ is C₁-C₆ alkyl; and m is 1, 2, 3, or 4. In some embodiments, R¹ is an aryl. In some embodiments, the aryl is a phenyl.

[0196] In some embodiments, any of the siNA molecules, sense strands, first nucleotide sequences, antisense strands, or second nucleotide sequences disclosed herein comprise a 5′-stabilized end cap of Formula (Ic):

[chemical structure]

wherein R¹ is a nucleobase, aryl, heteroaryl, or H,

### R² is

[chemical structure]

—CH═CD-Z, —CD=CH—Z, —CD=CD-Z, —(CR²¹R²²)ₙ—Z, or —(C₂-C₆ alkenylene)-Z and R²⁰ is hydrogen; or R² and R²⁰ together form a 3- to 7-membered carbocyclic ring substituted with —(CR²¹R²²)ₙ—Z or —(C₂-C₆ alkenylene)-Z; n is 1, 2, 3, or 4; Z is —ONR²³R²⁴, —OP(O)OH(CH₂)ₘCO₂R²³, —OP(S)OH(CH₂)ₘCO₂R²³, —P(O)(OH)₂, —P(O)(OH)(OCH₃), —P(O)(OH)(OCD₃), —SO₂(CH₂)ₘP(O)(OH)₂, —SO₂NR²³R²⁵, —NR²³R²⁴, or —NR²³SO₂R²⁵; R²¹ and R²² either are independently hydrogen or C₁-C₆ alkyl, or R²¹ and R²² together form an oxo group; R²³ is hydrogen or C₁-C₆ alkyl; R²⁴ is —SO₂R²⁵ or —C(O)R²⁵; or

[0198] R²³ and R²⁴ together with the nitrogen to which they are attached form a substituted or unsubstituted heterocyclic ring; R²⁵ is C₁-C₆ alkyl; and m is 1, 2, 3, or 4. In some embodiments, R¹ is an aryl. In some embodiments, the aryl is a phenyl.

[0199] In some embodiments, any of the siNA molecules, sense strands, first nucleotide sequences, antisense strands, or second nucleotide sequences disclosed herein comprise a 5′-stabilized end cap of Formula (IIa):

[chemical structure]

wherein R¹ is a nucleobase, aryl, heteroaryl,

### or H, R² is

[chemical structure]

—CH₂SO₂NHCH₃, or

[chemical structure]

R⁹ is —SO₂CH₃ or —COCH₃, [symbol] is a double or single bond, R¹⁰=—CH₂PO₃H or —NHCH₃, R¹¹ is —CH₂— or —CO—, and R¹² is H and R¹¹ is CH₃ or R¹² and R¹¹ together form —CH₂CH₂CH₂—. In some embodiments, le is an aryl. In some embodiments, the aryl is a phenyl.

[0201] In some embodiments, any of the siNA molecules, sense strands, first nucleotide sequences, antisense strands, or second nucleotide sequences disclosed herein comprise a 5′-stabilized end cap of Formula (IIb):

[chemical structure]

wherein R¹ is a nucleobase, aryl, heteroaryl, or H, R² is

[chemical structure]

—CH₂SO₂NHCH₃, or

[chemical structure]

R⁹ is —SO₂CH₃ or —COCH₃, [symbol] is a double or single bond, R¹⁰=—CH₂PO₃H or —NHCH₃, is —CH₂— or —CO—, and R¹² is H and R¹³ is CH₃ or R¹² and R¹³ together form —CH₂CH₂CH₂—. In some embodiments, le is an aryl. In some embodiments, the aryl is a phenyl.

[0202] In some embodiments, any of the siNA molecules, sense strands, first nucleotide sequences, antisense strands, or second nucleotide sequences disclosed herein comprise a 5′-stabilized end cap of Formula (III):

[chemical structure]

wherein R¹ is a nucleobase, aryl, heteroaryl, or H, L is —CH₂—, —CH═CH—, —CO—, or —CH₂CH₂—, and A is —ONHCOCH₃, —ONHSO₂CH₃, —PO₃H, —OP(SOH)CH₂CO₂H, —SO₂CH₂PO₃H, —SO₂NHCH₃, —NHSO₂CH₃, or —N(SO₂CH₂CH₂CH₂). In some embodiments, R¹ is an aryl. In some embodiments, the aryl is a phenyl.

[0203] In some embodiments, any of the siNA molecules, sense strands, first nucleotide sequences, antisense strands, or second nucleotide sequences disclosed herein comprise a 5′-stabilized end cap selected from Examples 5-11, 33-35, 38, 39, 43, and 49-53 5′ end cap monomers.

[0204] Further disclosed herein are siNA molecules comprising (a) a 5′-stabilized end cap of Formula (Ia):

[chemical structure]

wherein R¹ is a nucleobase, aryl, heteroaryl, or H; R² is

[chemical structure]

—CH═CD-Z, —CD=CH—Z, —CD=CD-Z, —(CR²¹R²²)ₙ—Z, or —(C₂-C₆ alkenylene)-Z and R²⁰ is H; or R² and R²⁰ together form a 3- to 7-membered carbocyclic ring substituted with —(CR²¹R²²)ₙ—Z or —(C₂-C₆ alkenylene)-Z; n is 1, 2, 3, or 4; Z is —ONR²³R²⁴, —OP(O)OH(CH₂)ₘCO₂R²³, —OP(S)OH(CH₂)ₘCO₂R²³, —P(O)(OH)₂, —P(O)(OH)(OCH₃), —P(O)(OH)(OCD₃), —SO₂(CH₂)ₘP(O)(OH)₂, —SO₂NR²³R²⁵, —NR²³R²⁴, —NR²³SO₂R²⁵; either R²¹ and R²² are independently hydrogen or C₁-C₆ alkyl, or R²¹ and R²² together form an oxo group; R²³ is hydrogen or C₁-C₆ alkyl; R²⁴ is —SO₂R²⁵ or —C(O)R²⁵; or R²³ and R²⁴ together with the nitrogen to which they are attached form a substituted or unsubstituted heterocyclic ring; R²⁵ is C₁-C₆ alkyl; and m is 1, 2, 3, or 4; and (b) a short interfering nucleic acid (siNA), wherein the 5′-stabilized end cap is conjugated to the siNA. In some embodiments, R¹ is an aryl. In some embodiments, the aryl is a phenyl.

[0205] Further disclosed herein are siNA molecules comprising (a) a 5′-stabilized end cap of Formula (Ib):

[chemical structure]

wherein R¹ is a nucleobase, aryl, heteroaryl, or H; R² is

[chemical structure]

—CH═CD-Z, —CD=CH—Z, —CD=CD-Z, —(CR²¹R²²)ₙ—Z, or —(C₂-C₆ alkenylene)-Z and R²⁰ is H; or R² and R²⁰ together form a 3- to 7-membered carbocyclic ring substituted with —(CR²¹R²²)ₙ—Z or —(C₂-C₆ alkenylene)-Z; n is 1, 2, 3, or 4; Z is —ONR²³R²⁴, —OP(O)OH(CH₂)ₘCO₂R²³, —OP(S)OH(CH₂)ₘCO₂R²³, —P(O)(OH)₂, —P(O)(OH)(OCH₃), —P(O)(OH)(OCD₃), —SO₂(CH₂)ₘP(O)(OH)₂, —SO₂NR²³R²⁵, —NR²³R²⁴, —NR²³SO₂R²⁵; either R²¹ and R²² are independently hydrogen or C₁-C₆ alkyl, or R²¹ and R²² together form an oxo group; R²³ is hydrogen or C₁-C₆ alkyl; R²⁴ is —SO₂R²⁵ or —C(O)R²⁵; or R²³ and R²⁴ together with the nitrogen to which they are attached form a substituted or unsubstituted heterocyclic ring; R²⁵ is C₁-C₆ alkyl; and m is 1, 2, 3, or 4; and (b) a short interfering nucleic acid (siNA), wherein the 5′-stabilized end cap is conjugated to the siNA. In some embodiments, R¹ is an aryl. In some embodiments, the aryl is a phenyl.

[0206] Further disclosed herein are siNA molecules comprising (a) a 5′-stabilized end cap of Formula (Ic):

[chemical structure]

wherein R¹ is a nucleobase, aryl, heteroaryl, or H, R² is

[chemical structure]

—CH═CD-Z, —CD=CH—Z, —CD=CD-Z, —(CR²¹R²²)ₙ—Z, or —(C₂-C₆ alkenylene)-Z and R²⁰ is hydrogen; or R² and R²⁰ together form a 3- to 7-membered carbocyclic ring substituted with —(CR²¹R²²)ₙ—Z or —(C₂-C₆ alkenylene)-Z; n is 1, 2, 3, or 4; Z is —ONR²³R²⁴, —OP(O)OH(CH₂)ₘCO₂R²³, —OP(S)OH(CH₂)ₘCO₂R²³, —P(O)(OH)₂, —P(O)(OH)(OCH₃), —P(O)(OH)(OCD₃), —SO₂(CH₂)ₘP(O)(OH)₂, —SO₂NR²³R²⁵, NR²³R²⁴, or —NR²³SO₂R²⁵; R²¹ and R²² either are independently hydrogen or C₁-C₆ alkyl, or R²¹ and R²² together form an oxo group; R²³ is hydrogen or C₁-C₆ alkyl; R²⁴ is —SO₂R²⁵ or —C(O)R²⁵; or R²³ and R²⁴ together with the nitrogen to which they are attached form a substituted or unsubstituted heterocyclic ring; R²⁵ is C₁-C₆ alkyl; and m is 1, 2, 3, or 4; and (b) a short interfering nucleic acid (siNA), wherein the 5′-stabilized end cap is conjugated to the siNA. In some embodiments, R¹ is an aryl. In some embodiments, the aryl is a phenyl.

[0207] In some embodiments, a siNA molecule comprises (a) a 5′-stabilized end cap of Formula (IIa):

[chemical structure]

wherein R¹ is a nucleobase, aryl, heteroaryl, or H, R² is

[chemical structure]

CH₂SO₂NHCH₃, or

[chemical structure]

R⁹ is —SO₂CH₃ or —COCH₃, wherein [symbol] is a double or single bond, R¹⁰=—CH₂PO₃H or —NHCH₃, R¹¹ is —CH₂— or —CO—, and R¹² is H and R¹³ is CH₃ or R¹² and R¹³ together form —CH₂CH₂CH₂—; and (b) a short interfering nucleic acid (siNA), wherein the 5′-stabilized end cap is conjugated to the siNA. In some embodiments, R¹ is an aryl. In some embodiments, the aryl is a phenyl.

[0208] In some embodiments, a siNA molecule comprises (a) a 5′-stabilized end cap of Formula (IIb):

[chemical structure]

wherein R¹ is a nucleobase, aryl, heteroaryl, or H, R² is

[chemical structure]

CH₂SO₂NHCH₃, or

[chemical structure]

R⁹ is —SO₂CH₃ or —COCH₃, wherein [symbol] is a double or single bond, R¹⁰=—CH₂PO₃H or —NHCH₃, R¹¹ is —CH₂— or —CO—, and R¹² is H and R¹³ is CH₃ or R¹² and R¹³ together form —CH₂CH₂CH₂—; and (b) a short interfering nucleic acid (siNA), wherein the 5′-stabilized end cap is conjugated to the siNA. In some embodiments, R¹ is an aryl. In some embodiments, the aryl is a phenyl.

[0209] In some embodiments, a siNA molecule comprises (a) a 5′-stabilized end cap of Formula (III):

[chemical structure]

wherein R¹ is a nucleobase, aryl, heteroaryl, or H, L is —CH₂—, —CH═CH—, —CO—, or —CH₂CH₂—, and A is —ONHCOCH₃, —ONHSO₂CH₃, —PO₃H, —OP(SOH)CH₂CO₂H, —SO₂CH₂PO₃H, —SO₂NHCH₃, —NHSO₂CH₃, or —N(SO₂CH₂CH₂CH₂); and (b) a siNA, wherein the 5′-stabilized end cap is conjugated to the siNA. In some embodiments, 10 is an aryl. In some embodiments, the aryl is phenyl.

[0210] In some embodiments, any of the siNA molecules disclosed herein comprise a 5′-stabilized end cap selected from the group consisting of Formula (1) to Formula (15), Formula (9X) to Formula (12X), and Formula (9Y) to Formula (12Y):

[chemical structure]

[chemical structure]

[chemical structure]

wherein R¹ is a nucleobase, aryl, heteroaryl, or H. In some embodiments, R¹ is an aryl. In some embodiments, the aryl is a phenyl.

[0211] In some embodiments, any of the siNA molecules disclosed herein comprise a 5′-stabilized end cap selected from the group consisting of Formulas (1A)-(15A), Formulas (9B)-(12B), Formulas (9AX)-(12AX), Formulas (9AY)-(12AY), Formulas (9BX)-(12BX), and Formulas (9BY)-(12BY):

[chemical structure]

[chemical structure]

[chemical structure]

[chemical structure]

[0212] In some embodiments, any of the siNA molecules disclosed herein comprise a 5′-stabilized end cap selected from the group consisting of Formula (21) to Formula (35):

[chemical structure]

[chemical structure]

[chemical structure]

wherein R¹ is a nucleobase, aryl, heteroaryl, or H. In some embodiments, R¹ is an aryl. In some embodiments, the aryl is a phenyl.

[0213] In some embodiments, any of the siNA molecules disclosed herein comprise a 5′-stabilized end cap selected from the group consisting of Formulas (21A)-(35A), Formulas (29B)-(32B), Formulas (29AX)-(32AX), Formulas (29AY)-(32AY), Formulas (29BX)-(32BX), and Formulas (29BY)-(32BY):

[chemical structure]

[chemical structure]

[chemical structure]

[chemical structure]

[chemical structure]

[0214] In some embodiments, the 5′-stabilized end cap is attached to the 5′ end of the antisense strand. In some embodiments, the 5′-stabilized end cap is attached to the 5′ end of the antisense strand via 1, 2, 3, 4, or 5 or more linkers. In some embodiments, one or more linkers are independently selected from the group consisting of a phosphodiester (p or po) linker, phosphorothioate (ps) linker, phosphoramidite (HEG) linker, triethylene glycol (TEG) linker, and/or phosphorodithioate linker.

### Linkers

[0215] In some embodiments, any of the siRNAs, sense strands, first nucleotide sequences, antisense strands, and/or second nucleotide sequences disclosed herein comprise 1, 2, 3, 4, 5, 6, 7, 8, 9, 10, 11, 12, 13, 14, 15, 16, 17, 18, 19, 20, 21, 22, 23 or more internucleoside linkers. In some embodiments, 1, 2, 3, 4, 5, 6, 7, 8, 9, 10 or more internucleoside linkers are independently selected from the group consisting of a phosphodiester (p or po) linker, phosphorothioate (ps) linker, or phosphorodithioate linker.

[0216] In some embodiments, any of the siRNAs, sense strands, first nucleotide sequences, antisense strands, and/or second nucleotide sequences disclosed herein further comprise 1, 2, 3, 4 or more linkers that attach a conjugated moiety, phosphorylation blocker, and/or 5′ end cap to the siRNA, sense strand, first nucleotide sequence, antisense strand, and/or second nucleotide sequences. In some embodiments, the 1, 2, 3, 4 or more linkers are independently selected from the group consisting of a phosphodiester (p or po) linker, phosphorothioate (ps) linker, phosphoramidite (HEG) linker, triethylene glycol (TEG) linker, and/or phosphorodithioate linker. In some embodiments, the one or more linkers are independently selected from the group consisting of p-(ps)₂, (ps)2-p-TEG-p, (ps)2-p-HEG-p, and (ps)2-p-(HEG-p)2.

### Specific Embodiments

[0217] The present disclosure provides numerous siNA that can be used to treat or prevent viral infections, specifically coronavirus (e.g., SARS-CoV-2) infections, such as COVID-19. Table 3, below, provides a non-limiting list of siNA that incorporate the nucleic acid sequences, modified nucleotides, phosphorylation blockers, 5′ stabilized end caps, and/or linkers of the foregoing sections. Those of skill in the art will understand that other exemplary siNA can be constructed by combining the sequences disclosed in Table 1 (or fragments of the sequences disclosed in Table 2) with the modified nucleotides, phosphorylation blockers, 5′ stabilized end caps, and/or linkers of the foregoing sections.

TABLE 3
Exemplary siNA

| | SEQ | | SEQ | |
|---|---|---|---|---|
| | ID | | ID | |
| Name | NO: | Sense Sequence (5′→3′) | NO: | Antisense Sequence (5′→3′) |
| ds- | 4383 | rGrCrUrCrCrUrArArUrUrArCrArCrUr | 4605 | rGrUrUrGrArGrUrGrUrArArUrUrArGr |
| siNA- | | CrArArCTT | | GrArGrCTT |
| 001 | | | | |
| ds- | 4384 | rGrGrArUrGrArGrGrArArGrGrCrArAr | 4606 | rUrArArArUrUrGrCrCrUrUrCrCrUrCr |
| siNA- | | UrUrUrATT | | ArUrCrCTT |
| 002 | | | | |
| ds- | 4385 | rCrCrGrCrUrGrGrArGrArGrCrArArCr | 4607 | rUrGrCrArGrUrUrGrCrUrCrUrCrCrUr |
| siNA- | | UrGrCrATT | | GrCrGrGTT |
| 003 | | | | |
| ds- | 4386 | rGrCrUrArUrGrArArArCrGrArUrArUr | 4608 | rGrCrCrCrArUrArUrCrGrUrUrUrCrAr |
| siNA- | | GrGrGrCTT | | UrArGrCTT |
| 004 | | | | |
| ds- | 4387 | fUpsmApsfGmCfAmGfCmAfUmUfA | 4609 | mCpsfApsmGfGmAfUmGfGmUfAmAf |
| siNA- | | mCfCmAfUmCfCmUfGpsTpsT | | UmGfCmUfGmCfUmATpsT |
| 005 | | | | |
| ds- | 4388 | mCpsfApsmAmCmAmCmGmGmAmC | 4610 | mUpsmApsfCmGmGmUfUfUfCmGmU |
| siNA- | | mGmAmAfAmCmCmGmUmApsTpsT | | fCmCmGmUmGfUmUmGTpsT |
| 006 | | | | |
| ds- | 4389 | mCpsmApsfCmGmUmCfCfAfAmCmU | 4611 | mGpsfCpsmAmAmAmCmUmGmAmG |
| siNA- | | fCmAmGmUmUfUmGmCTpsT | | mUmUmGfGmAmCmGmUmGpsTpsT |
| 007 | | | | |
| ds- | 4390 | mUpsmGpsfAmAmCmAfGfCfCmCm | 4612 | mGpsfApsmAmCmAmCmAmUmAmG |
| siNA- | | UfAmUmGmUmGfUmUmCTpsT | | mGmGmCfUmGmUmUmCmApsTpsT |
| 008 | | | | |
| ds- | 4391 | mApsmCpsfGmAmGmCfUfUfGmGm | 4613 | mGpsfGpsmAmUmCmAmGmUmGmC |
| siNA- | | CfAmCmUmGmAfUmCmCTpsT | | mCmAmAfGmCmUmCmGmUpsTpsT |
| 009 | | | | |
| ds- | 4392 | mUpsmCpsfAmUmGmUfGfGfUmAm | 4614 | mApsfApsmCmCmAmAmCmAmCmU |
| siNA- | | GfUmGmUmUmGfGmUmUTpsT | | mAmCmCfAmCmAmUmGmApsTpsT |
| 010 | | | | |
| ds- | 4393 | mApsmCpsfAmAmCmAfUfUfAmUm | 4615 | mGpsfCpsmAmUmUmGmUmUmGmA |
| siNA- | | CfAmAmCmAmAfUmGmCTpsT | | mUmAmAfUmGmUmUmGmUpsTpsT |
| 011 | | | | |
| ds- | 4394 | mApsfApsmAmCmCmUmAmCmAmA | 4616 | mGpsmGpsfAmAmCmCfAfCfCmUmU |
| siNA- | | mGmGmUfGmGmUmUmCmCpsTpsT | | fGmUmAmGmGfUmUmUTpsT |
| 012 | | | | |
| ds- | 4395 | mCpsmGpsfUmUmUmUfUfAfAmAm | 4617 | mGpsfCpsmAmAmAmCmCmCmGmU |
| siNA- | | CfGmGmGmUmUfUmGmCTpsT | | mUmUmAfAmAmAmAmCmGpsTpsT |
| 013 | | | | |
| ds- | 4396 | mGpsfUpsmGmCmCmGmCmAmCmG | 4618 | mGpsmUpsfCmUmUmAfCfAfCmCmG |
| siNA- | | mGmUmGfUmAmAmGmAmCpsTpsT | | fUmGmCmGmGfCmAmCTpsT |
| 014 | | | | |
| ds- | 4397 | TmUpsfGpsmAmCmGmUmGmAmUm | 4619 | mUpsmApsfCmCmAmCfAfUfAmUmA |
| siNA- | | AmUmAmUfGmUmGmGmUmApsTps | | fUmCmAmCmGfUmCmATpsT |
| 015 | | | | |
| ds- | 4398 | mGpsmGpsfAmUmGmUfAfAfAmCm | 4620 | mGpsfCpsmUmAmUmGmUmAmAmG |
| siNA- | | UfUmAmCmAmUfAmGmCTpsT | | mUmUmUfAmCmAmUmCmCpsTpsT |
| 016 | | | | |
| ds- | 4399 | mApsfCpsmCmGmGmGmUmUmUmG | 4621 | mUpsmCpsfAmAmAmCfUfGfUmCmA |
| siNA- | | mAmCmAfGmUmUmUmGmApsTpsT | | fAmAmCmCmCfGmGmUTpsT |
| 017 | | | | |
| ds- | 4400 | mUpsmGpsfUmCmAmAfAfCfCmCm | 4622 | mApsfApsmAmAmUmUmAmCmCmG |
| siNA- | | GfGmUmAmAmUfUmUmUTpsT | | mGmGmUfUmUmGmAmCmApsTpsT |
| 018 | | | | |
| ds- | 4401 | mUpsmApsfAmGmUmAfUfGfCmCm | 4623 | mUpsfGpsmCmAmCmUmAmAmUmG |
| siNA- | | AfUmUmAmGmUfGmCmATpsT | | mGmCmAfUmAmCmUmUmApsTpsT |
| 019 | | | | |
| ds- | 4402 | mUpsmGpsfCmCmAmUfUfAfGmUm | 4624 | mApsfUpsmUmCmUmUmUmGmCmA |
| siNA- | | GfCmAmAmAmGfAmAmUTpsT | | mCmUmAfAmUmGmGmCmApsTpsT |
| 020 | | | | |
| ds- | 4403 | mGpsfCpsmGmAmGmCmUmCmUmA | 4625 | mUpsmGpsfCmAmAmAfGfAfAmUmA |
| siNA- | | mUmUmCfUmUmUmGmCmApsTpsT | | fGmAmGmCmUfCmGmCTpsT |
| 021 | | | | |
| ds- | 4404 | mGpsfApsmCmAmCmCmAmGmCmU | 4626 | mUpsmCpsfGmCmAmCfCfGfUmAmG |
| siNA- | | mAmCmGfGmUmGmCmGmApsTpsT | | fCmUmGmGmUfGmUmCTpsT |
| 022 | | | | |
| ds- | 4405 | mCpsmApsfAmUmAmGfCfCfGmCmC | 4627 | mCpsfCpsmUmCmUmAmGmUmGmG |
| siNA- | | fAmCmUmAmGfAmGmGTpsT | | mCmGmGfCmUmAmUmUmGpsTpsT |
| 023 | | | | |
| ds- | 4406 | mApsmCpsfUmGmCmUfUfAfUmGm | 4628 | mCpsfApsmCmUmAmUmUmAmGmC |
| siNA- | | CfUmAmAmUmAfGmUmGTpsT | | mAmUmAfAmGmCmAmGmUpsTpsT |
| 024 | | | | |
| ds- | 4407 | mApsfCpsmAmUmCmAmGmCmAmU | 4629 | mApsmUpsfCmAmGmGfAfGfUmAmU |
| siNA- | | mAmCmUfCmCmUmGmAmUpsTpsT | | fGmCmUmGmAfUmGmUTpsT |
| 025 | | | | |
| ds- | 4408 | mUpsmApsfGmGmAmGfGfUfAmUm | 4630 | mUpsfApsmAmUmAmGmCmUmCmA |
| siNA- | | GfAmGmCmUmAfUmUmATpsT | | mUmAmCfCmUmCmCmUmApsTpsT |
| 026 | | | | |
| ds- | 4409 | mApsmCpsfUmAmUmGfGfUfGmAm | 4631 | mApsfCpsmAmAmCmAmGmCmAmU |
| siNA- | | UfGmCmUmGmUfUmGmUTpsT | | mCmAmCfCmAmUmAmGmUpsTpsT |
| 027 | | | | |
| ds- | 4410 | mApsfCpsmAmUmAmGmUmGmCmU | 4632 | mUpsmGpsfCmCmAmCfAfAfGmAmG |
| siNA- | | mCmUmUfGmUmGmGmCmApsTpsT | | fCmAmCmUmAfUmGmUTpsT |
| 028 | | | | |
| ds- | 4411 | mUpsfApsmUmAmCmAmCmUmAmU | 4633 | mUpsmCpsfUmGmCmUfCfGfCmAmU |
| siNA- | | mGmCmGfAmGmCmAmGmApsTpsT | | fAmGmUmGmUfAmUmATpsT |
| 029 | | | | |
| ds- | 4412 | mApsmApsfUmUmCmAfAfAfGmUm | 4634 | mGpsfUpsmUmGmAmAmUmUmCmA |
| siNA- | | GfAmAmUmUmCfAmAmCTpsT | | mCmUmUfUmGmAmAmUmUpsTpsT |
| 030 | | | | |
| ds- | 4413 | mApsfGpsmGmAmAmCmAmUmGm | 4635 | mUpsmApsfGmGmUmCfCfAfGmAmC |
| siNA- | | UmCmUmGfGmAmCmCmUmApsTps | | fAmUmGmUmUfCmCmUTpsT |
| 031 | | T | | |
| ds- | 4414 | mUpsfGpsmAmAmUmAmUmGmAm | 4636 | mUpsmApsfUmGmAmCfUfAfUmGmU |
| siNA- | | CmAmUmAfGmUmCmAmUmApsTps | | fCmAmUmAmUfUmCmATpsT |
| 032 | | T | | |
| ds- | 4415 | mUpsmUpsfUmGmAmGfCfUfUmUm | 4637 | mGpsfCpsmUmUmAmGmCmCmCmA |
| siNA- | | GfGmGmCmUmAfAmGmCTpsT | | mAmAmGfCmUmCmAmAmApsTpsT |
| 033 | | | | |
| ds- | 4416 | mUpsmApsfAmUmGmAfUfGfAmAm | 4638 | mUpsfUpsmUmGmCmGmAmCmAmU |
| siNA- | | UfGmUmCmGmCfAmAmATpsT | | mUmCmAfUmCmAmUmUmApsTpsT |
| 034 | | | | |
| ds- | 4417 | mGpsmApsfGmUmAmCfGfAfAmCm | 4639 | mApsfGpsmUmAmCmAmUmAmAmG |
| siNA- | | UfUmAmUmGmUfAmCmUTpsT | | mUmUmCfGmUmAmCmUmCpsTpsT |
| 035 | | | | |
| ds- | 4418 | mGpsmGpsfUmAmCmGfUfUfAmAm | 4640 | mUpsfApsmUmUmAmAmCmUmAmU |
| siNA- | | UfAmGmUmUmAfAmUmATpsT | | mUmAmAfCmGmUmAmCmCpsTpsT |
| 036 | | | | |
| ds- | 4419 | mGpsfApsmAmAmAmAmGmAmAm | 4641 | mApsmApsfUmAmGmCfGfUfAmCmU |
| siNA- | | GmUmAmCfGmCmUmAmUmUpsTps | | fUmCmUmUmUfUmUmCTpsT |
| 037 | | T | | |
| ds- | 4420 | mGpsfCpsmAmAmGmAmAmUmAmC | 4642 | mGpsmCpsfUmUmUmCfGfUfGmGmU |
| siNA- | | mCmAmCfGmAmAmAmGmCpsTpsT | | fAmUmUmCmUfUmGmCTpsT |
| 038 | | | | |
| ds- | 4421 | mApsfCpsmAmAmUmCmGmAmAmG | 4643 | mCpsmUpsfUmAmCmUfGfCfGmCmU |
| siNA- | | mCmGmCfAmGmUmAmAmGpsTpsT | | fUmCmGmAmUfUmGmUTpsT |
| 039 | | | | |
| ds- | 4422 | mUpsmUpsfCmUmGmGfUfCfUmAm | 4644 | mUpsfApsmGmUmUmCmGmUmUmU |
| siNA- | | AfAmCmGmAmAfCmUmATpsT | | mAmGmAfCmCmAmGmAmApsTpsT |
| 040 | | | | |
| ds- | 4423 | mUpsfApsmAmUmAmAmGmAmAm | 4645 | mCpsmApsfCmGmAmAfCfGfCmUmU |
| siNA- | | AmGmCmGfUmUmCmGmUmGpsTps | | fUmCmUmUmAfUmUmATpsT |
| 041 | | T | | |
| ds- | 4424 | mUpsfGpsmUmAmUmGmCmAmGmC | 4646 | mUpsmCpsfAmGmGmUfUfUfUmGmC |
| siNA- | | mAmAmAfAmCmCmUmGmApsTpsT | | fUmGmCmAmUfAmCmATpsT |
| 042 | | | | |
| ds- | 4425 | mCpsfApsmUmCmUmGmUmUmGmU | 4647 | mCpsmApsfGmUmAmAfGfUfGmAmC |
| siNA- | | mCmAmCfUmUmAmCmUmGpsTpsT | | fAmAmCmAmGfAmUmGTpsT |
| 043 | | | | |
| ds- | 4426 | mUpsmApsfCmCmCmAfAfUfAmAm | 4648 | mGpsfApsmCmGmCmAmGmUmAmU |
| siNA- | | UfAmCmUmGmCfGmUmCTpsT | | mUmAmUfUmGmGmGmUmApsTpsT |
| 044 | | | | |
| ds- | 4427 | mCpsfUpsmUmCmGmGmUmAmGmU | 4649 | mApsmApsfAmUmUmGfGfCfUmAmC |
| siNA- | | mAmGmCfCmAmAmUmUmUpsTpsT | | fUmAmCmCmGfAmAmGTpsT |
| 045 | | | | |
| ds- | 4428 | mCpsmApsfAmAmAmGfGfCfUmUm | 4650 | mUpsfCpsmUmGmCmGmUmAmGmA |
| siNA- | | CfUmAmCmGmCfAmGmATpsT | | mAmGmCfCmUmUmUmUmGpsTpsT |
| 046 | | | | |
| ds- | 4429 | mUpsmGpsfUmCmAmCfUfAfAmGm | 4651 | mApsfGpsmCmAmGmAmUmUmUmC |
| siNA- | | AfAmAmUmCmUfGmCmUTpsT | | mUmUmAfGmUmGmAmCmApsTpsT |
| 047 | | | | |
| ds- | 4430 | mGpsmApsfCmAmAmGfGfAfAmCm | 4652 | mUpsfUpsmGmUmAmAmUmCmAmG |
| siNA- | | UfGmAmUmUmAfCmAmATpsT | | mUmUmCfCmUmUmGmUmCpsTpsT |
| 048 | | | | |
| ds- | 4431 | mCpsmApsfUmGmGmAfAfGfUmCm | 4653 | mCpsfGpsmAmAmGmGmUmGmUmG |
| siNA- | | AfCmAmCmCmUfUmCmGTpsT | | mAmCmUfUmCmCmAmUmGpsTpsT |
| 049 | | | | |
| ds- | 4432 | mCpsfApsmUmUmCmUmGmCmAmC | 4654 | mUpsmCpsfUmAmCmUfCfUfUmGmU |
| siNA- | | mAmAmGfAmGmUmAmGmApsTpsT | | fGmCmAmGmAfAmUmGTpsT |
| 050 | | | | |
| ds- | 4433 | mCpsmApsfCmAmUmAfGfCfAmAm | 4655 | mGpsfApsmUmUmAmAmAmGmAmU |
| siNA- | | UfCmUmUmUmAfAmUmCTpsT | | mUmGmCfUmAmUmGmUmGpsTpsT |
| 051 | | | | |
| ds- | 4434 | mApsfApsmAmUmGmUmGmGmUm | 4656 | mUpsmGpsfAmAmAmGfAfGfCmCmA |
| siNA- | | GmGmCmUfCmUmUmUmCmApsTps | | fCmCmAmCmAfUmUmUTpsT |
| 052 | | T | | |
| ds- | 4435 | mUpsfUpsmUmAmCmAmCmAmUmU | 4657 | mApsmApsfGmAmGmCfCfCfUmAmA |
| siNA- | | mAmGmGfGmCmUmCmUmUpsTpsT | | fUmGmUmGmUfAmAmATpsT |
| 053 | | | | |
| ds- | 4436 | mUpsmApsmCmGfGmUmUmUfCfGf | 4658 | mUpsfGpsmCmAmAmCmAmCmGmG |
| siNA- | | UmCmCfGmUmGmUmUfGmCpsmA | | mAmCmGfAmAmAmCmCmGmUmAp |
| 054 | | | | sTpsT |
| ds- | 4437 | mApsfApsmCmUmGmAmGmUmUm | 4659 | mApsmApsmAmCfAmCmAmCfGfUfC |
| siNA- | | GmGmAmCfGmUmGmUmGmUmUm | | mCmAfAmCmUmCmAfGmUpsmU |
| 055 | | UpsTpsT | | |
| ds- | 4438 | mUpsmGpsmAmAfCmAmGmCfCfCf | 4660 | mApsfUpsmGmAmAmCmAmCmAmU |
| siNA- | | UmAmUfGmUmGmUmUfCmApsmU | | mAmGmGfGmCmUmGmUmUmCmAp |
| 056 | | | | sTpsT |
| ds- | 4439 | mUpsmApsmUmUfUmAmAmAfAfCf | 4661 | mApsfUpsmUmGmUmCmAmGmUmA |
| siNA- | | UmUmAfCmUmGmAmCfAmApsmU | | mAmGmUfUmUmUmAmAmAmUmA |
| 057 | | | | psTpsT |
| ds- | 4440 | mUpsfUpsmUmUmCmCmAmCmUmA | 4662 | mCpsmUpsmCmUfGmAmAmGfAfAfG |
| siNA- | | mCmUmUfCmUmUmCmAmGmAmG | | mUmAfGmUmGmGmAfAmApsmA |
| 058 | | psTpsT | | |
| ds- | 4441 | mUpsfGpsmUmUmAmAmAmAmCmC | 4663 | mGpsmUpsmGmGfUmAmGmUfGfUf |
| siNA- | | mAmAmCfAmCmUmAmCmCmAmC | | UmGmGfUmUmUmUmAfAmCpsmA |
| 059 | | psTpsT | | |
| ds- | 4442 | mGpsfUpsmAmAmCmAmAmAmCmC | 4664 | mApsmCpsmCmAfCmCmUmUfGfUfA |
| siNA- | | mUmAmCfAmAmGmGmUmGmGmU | | mGmGfUmUmUmGmUfUmApsmC |
| 060 | | psTpsT | | |
| ds- | 4443 | mUpsmGpsmUmUfGmUmGmUfAfCf | 4665 | mUpsfApsmCmCmAmGmUmGmUmG |
| siNA- | | AmCmAfCmAmCmUmGfGmUpsmA | | mUmGmUfAmCmAmCmAmAmCmAp |
| 061 | | | | sTpsT |
| ds- | 4444 | mApsmApsmAmGfGmUmUmAfUfGf | 4666 | mApsfCpsmAmAmCmUmAmCmAmG |
| siNA- | | GmCmUfGmUmAmGmUfUmGpsmU | | mCmCmAfUmAmAmCmCmUmUmUp |
| 062 | | | | sTpsT |
| ds- | 4445 | mUpsfUpsmAmCmAmCmCmGmCmA | 4667 | mUpsmUpsmAmAfAmCmGmGfGfUfU |
| siNA- | | mAmAmCfCmCmGmUmUmUmAmA | | mUmGfCmGmGmUmGfUmApsmA |
| 063 | | psTpsT | | |
| ds- | 4446 | mGpsmUpsmGmUfAmAmGmUfGfCf | 4668 | mUpsfApsmAmGmAmCmGmGmGmC |
| siNA- | | AmGmCfCmCmGmUmCfUmUpsmA | | mUmGmCfAmCmUmUmAmCmAmCp |
| 064 | | | | sTpsT |
| ds- | 4447 | mApsmCpsmAmUfGmGmUmAfCfCf | 4669 | mGpsfUpsmGmAmUmAmUmAmUmG |
| siNA- | | AmCmAfUmAmUmAmUfCmApsmC | | mUmGmGfUmAmCmCmAmUmGmUp |
| 065 | | | | sTpsT |
| ds- | 4448 | mUpsfUpsmAmCmCmGmGmGmUmU | 4670 | mUpsmCpsmAmAfAmCmUmGfUfCfA |
| siNA- | | mUmGmAfCmAmGmUmUmUmGmA | | mAmAfCmCmCmGmGfUmApsmA |
| 066 | | psTpsT | | |
| ds- | 4449 | mUpsfGpsmAmGmCmAmAmAmGm | 4671 | mApsmApsmAmAfCmAmCmUfUfCfU |
| siNA- | | AmAmGmAfAmGmUmGmUmUmUm | | mUmCfUmUmUmGmCfUmCpsmA |
| 067 | | UpsTpsT | | |
| ds- | 4450 | mApsfGpsmCmCmAmCmCmAmUmC | 4672 | mUpsmUpsmGmAfUmUmGmUfUfAfC |
| siNA- | | mGmUmAfAmCmAmAmUmCmAmA | | mGmAfUmGmGmUmGfGmCpsmU |
| 068 | | psTpsT | | |
| ds- | 4451 | mApsmApsmAmUfGmAmAmUfCfUf | 4673 | mUpsfGpsmGmCmAmUmAmCmUmU |
| siNA- | | UmAmAfGmUmAmUmGfCmCpsmA | | mAmAmGfAmUmUmCmAmUmUmU |
| 069 | | | | psTpsT |
| ds- | 4452 | mApsfUpsmUmCmUmUmUmGmCmA | 4674 | mUpsmApsmUmGfCmCmAmUfUfAfG |
| siNA- | | mCmUmAfAmUmGmGmCmAmUmA | | mUmGfCmAmAmAmGfAmApsmU |
| 070 | | psTpsT | | |
| ds- | 4453 | mCpsfUpsmAmUmUmCmUmUmUmG | 4675 | mUpsmGpsmCmCfAmUmUmAfGfUfG |
| siNA- | | mCmAmCfUmAmAmUmGmGmCmA | | mCmAfAmAmGmAmAfUmApsmG |
| 071 | | psTpsT | | |
| ds- | 4454 | mCpsfUpsmAmCmGmGmUmGmCmG | 4676 | mApsmGpsmAmAfUmAmGmAfGfCfU |
| siNA- | | mAmGmCfUmCmUmAmUmUmCmU | | mCmGfCmAmCmCmGfUmApsmG |
| 072 | | psTpsT | | |
| ds- | 4455 | mApsmUpsmAmGfAmGmCmUfCfGf | 4677 | mCpsfApsmGmCmUmAmCmGmGmU |
| siNA- | | CmAmCfCmGmUmAmGfCmUpsmG | | mGmCmGfAmGmCmUmCmUmAmUp |
| 073 | | | | sTpsT |
| ds- | 4456 | mUpsmCpsmGmCfAmCmCmGfUfAf | 4678 | mGpsfApsmGmAmCmAmCmCmAmG |
| siNA- | | GmCmUfGmGmUmGmUfCmUpsmC | | mCmUmAfCmGmGmUmGmCmGmAp |
| 074 | | | | sTpsT |
| ds- | 4457 | mApsmApsmCmUfGmCmUmUfAfUf | 4679 | mApsfCpsmAmCmUmAmUmUmAmG |
| siNA- | | GmCmUfAmAmUmAmGfUmGpsmU | | mCmAmUfAmAmGmCmAmGmUmUp |
| 075 | | | | sTpsT |
| ds- | 4458 | mUpsfUpsmAmGmUmAmAmGmGm | 4680 | mGpsmApsmCmUfGmAmGmAfCfUfG |
| siNA- | | UmCmAmGfUmCmUmCmAmGmUm | | mAmCfCmUmUmAmCfUmApsmA |
| 076 | | CpsTpsT | | |
| ds- | 4459 | mApsfCpsmCmUmUmUmUmUmCmA | 4681 | mGpsmApsmGmUfAmCmAmCfCfUfU |
| siNA- | | mAmAmGfGmUmGmUmAmCmUmC | | mUmGfAmAmAmAmAfGmGpsmU |
| 077 | | psTpsT | | |
| ds- | 4460 | mUpsmGpsmGmUfAmCmUmGfGfUf | 4682 | mApsfApsmAmUmGmAmCmUmCmU |
| siNA- | | AmAmGfAmGmUmCmAfUmUpsmU | | mUmAmCfCmAmGmUmAmCmCmAp |
| 078 | | | | sTpsT |
| ds- | 4461 | mUpsmCpsmUmGfCmUmAmAfUfCf | 4683 | mApsfGpsmUmAmGmCmAmGmCmA |
| siNA- | | UmUmGfCmUmGmCmUfAmCpsmU | | mAmGmAfUmUmAmGmCmAmGmA |
| 079 | | | | psTpsT |
| ds- | 4462 | mCpsfGpsmCmUmAmUmUmAmAmC | 4684 | mGpsmUpsmAmCfGmUmUmAfAfUfA |
| siNA- | | mUmAmUfUmAmAmCmGmUmAmC | | mGmUfUmAmAmUmAfGmCpsmG |
| 080 | | psTpsT | | |
| ds- | 4463 | mUpsmUpsmCmUfUmGmCmUfUfUf | 4685 | mApsfGpsmAmAmUmAmCmCmAmC |
| siNA- | | CmGmUfGmGmUmAmUfUmCpsmU | | mGmAmAfAmGmCmAmAmGmAmA |
| 081 | | | | psTpsT |
| ds- | 4464 | mCpsmUpsmUmAfCmUmGmCfGfCf | 4686 | mApsfCpsmAmCmAmAmUmCmGmA |
| siNA- | | UmUmCfGmAmUmUmGfUmGpsmU | | mAmGmCfGmCmAmGmUmAmAmGp |
| 082 | | | | sTpsT |
| ds- | 4465 | mCpsmGpsmCmUfUmCmGmAfUfUf | 4687 | mApsfGpsmUmAmCmGmCmAmCmA |
| siNA- | | GmUmGfUmGmCmGmUfAmCpsmU | | mCmAmAfUmCmGmAmAmGmCmGp |
| 083 | | | | sTpsT |
| ds- | 4466 | mUpsfApsmAmCmAmAmUmAmUm | 4688 | mCpsmGpsmUmAfCmUmGmCfUfGfC |
| siNA- | | UmGmCmAfGmCmAmGmUmAmCm | | mAmAfUmAmUmUmGfUmUpsmA |
| 084 | | GpsTpsT | | |
| ds- | 4467 | mUpsfCpsmGmUmUmUmAmGmAmC | 4689 | mCpsmUpsmGmAfUmCmUmUfCfUfG |
| siNA- | | mCmAmGfAmAmGmAmUmCmAmG | | mGmUfCmUmAmAmAfCmGpsmA |
| 085 | | psTpsT | | |
| ds- | 4468 | mUpsmCpsmAmCfGmAmAmCfGfCf | 4690 | mGpsfUpsmAmAmUmAmAmGmAmA |
| siNA- | | UmUmUfCmUmUmAmUfUmApsmC | | mAmGmCfGmUmUmCmGmUmGmAp |
| 086 | | | | sTpsT |
| ds- | 4469 | mUpsmApsmAmAfCmGmAmAfCfAf | 4691 | mApsfApsmUmAmAmUmUmUmUmC |
| siNA- | | UmGmAfAmAmAmUmUfAmUpsmU | | mAmUmGfUmUmCmGmUmUmUmA |
| 087 | | | | psTpsT |
| ds- | 4470 | mApsmApsmUmUfGmAmCmUfUfCf | 4692 | mApsfApsmGmCmAmCmAmAmAmU |
| siNA- | | UmAmUfUmUmGmUmGfCmUpsmU | | mAmGmAfAmGmUmCmAmAmUmU |
| 088 | | | | psTpsT |
| ds- | 4471 | mCpsmApsmAmUfAmAmUmAfCfUf | 4693 | mApsfApsmCmCmAmAmGmAmCmG |
| siNA- | | GmCmGfUmCmUmUmGfGmUpsmU | | mCmAmGfUmAmUmUmAmUmUmG |
| 089 | | | | psTpsT |
| ds- | 4472 | mApsmUpsmUmGfGmCmUmAfCfUf | 4694 | mApsfGpsmCmUmCmUmUmCmGmG |
| siNA- | | AmCmCfGmAmAmGmAfGmCpsmU | | mUmAmGfUmAmGmCmCmAmAmUp |
| 090 | | | | sTpsT |
| ds- | 4473 | mCpsfCpsmUmUmGmAmGmGmAmA | 4695 | mCpsmGpsmUmGfCmUmAmCfAfAfC |
| siNA- | | mGmUmUfGmUmAmGmCmAmCmG | | mUmUfCmCmUmCmAfAmGpsmG |
| 091 | | psTpsT | | |
| ds- | 4474 | mUpsfGpsmCmUmCmUmCmAmAmG | 4696 | mGpsmApsmUmUfGmAmAmCfCfAfG |
| siNA- | | mCmUmGfGmUmUmCmAmAmUmC | | mCmUfUmGmAmGmAfGmCpsmA |
| 092 | | psTpsT | | |
| ds- | 4475 | mUpsmGpsmGmUfAmAmAmGfGfCf | 4697 | mUpsfGpsmUmUmGmUmUmGmUmU |
| siNA- | | CmAmAfCmAmAmCmAfAmCpsmA | | mGmGmCfCmUmUmUmAmCmCmAp |
| 093 | | | | sTpsT |
| ds- | 4476 | mGpsfCpsmCmUmCmAmGmCmAmG | 4698 | mUpsmApsmAmGfAmAmAmUfCfUfG |
| siNA- | | mCmAmGfAmUmUmUmCmUmUmA | | mCmUfGmCmUmGmAfGmGpsmC |
| 094 | | psTpsT | | |
| ds- | 4477 | mUpsfUpsmUmGmUmAmAmUmCm | 4699 | mApsmGpsmAmCfAmAmGmGfAfAfC |
| siNA- | | AmGmUmUfCmCmUmUmGmUmCm | | mUmGfAmUmUmAmCfAmApsmA |
| 095 | | UpsTpsT | | |
| ds- | 4478 | mApsmApsmAmUfUmGmGmAfUfGf | 4700 | mUpsfGpsmGmAmUmCmUmUmUmG |
| siNA- | | AmCmAfAmAmGmAmUfCmCpsmA | | mUmCmAfUmCmCmAmAmUmUmUp |
| 096 | | | | sTpsT |
| ds- | 4479 | psTpsTmCpsfCpsmUmUmUmUmUmAmGmG | 4701 | mCpsmApsmCmCfAmAmCmAfGfAfG |
| siNA- | | mCmUmCfUmGmUmUmGmGmUmG | | mCmCfUmAmAmAmAfAmGpsmG |
| 097 | | | | |
| ds- | 4480 | mCpsmUpsmAmCfUmCmUmUfGfUf | 4702 | mApsfUpsmUmCmAmUmUmCmUmG |
| siNA- | | GmCmAfGmAmAmUmGfAmApsmU | | mCmAmCfAmAmGmAmGmUmAmGp |
| 098 | | | | sTpsT |
| ds- | 4481 | mUpsfCpsmGmAmUmCmGmUmAmC | 4703 | mGpsmGpsmCmCfAmCmGmCfGfGfA |
| siNA- | | mUmCmCfGmCmGmUmGmGmCmC | | mGmUfAmCmGmAmUfCmGpsmA |
| 099 | | psTpsT | | |
| ds- | 4482 | mUpsfUpsmUmUmAmCmAmCmAmU | 4704 | mGpsmApsmAmGfAmGmCmCfCfUfA |
| siNA- | | mUmAmGfGmGmCmUmCmUmUmC | | mAmUfGmUmGmUmAfAmApsmA |
| 100 | | psTpsT | | |
| ds- | 4483 | fUpsmApsfCmGfGmUfUmUfCmGfU | 4705 | mCpsfApsmAfCmAfCmGfGmAfCmGf |
| siNA- | | mCfCmGfUmGfUmUfGTpsT | | AmAfAmCfCmGfUmApsTpsT |
| 101 | | | | |
| ds- | 4484 | mGpsfCpsmAfAmAfCmUfGmAfGmU | 4706 | fCpsmApsfCmGfUmCfCmAfAmCfUm |
| siNA- | | fUmGfGmAfCmGfUmGpsTpsT | | CfAmGfUmUfUmGfCTpsT |
| 102 | | | | |
| ds- | 4485 | fUpsmGpsfAmAfCmAfGmCfCmCfUm | 4707 | mGpsfApsmAfCmAfCmAfUmAfGmGf |
| siNA- | | AfUmGfUmGfUmUfCTpsT | | GmCfUmGfUmUfCmApsTpsT |
| 103 | | | | |
| ds- | 4486 | fApsmCpsfGmAfGmCfUmUfGmGfCm | 4708 | mGpsfGpsmAfUmCfAmGfUmGfCmCf |
| siNA- | | AfCmUfGmAfUmCfCTpsT | | AmAfGmCfUmCfGmUpsTpsT |
| 104 | | | | |
| ds- | 4487 | fUpsmCpsfAmUfGmUfGmGfUmAfG | 4709 | mApsfApsmCfCmAfAmCfAmCfUmAf |
| siNA- | | mUfGmUfUmGfGmUfUTpsT | | CmCfAmCfAmUfGmApsTpsT |
| 105 | | | | |
| ds- | 4488 | fApsmCpsfAmAfCmAfUmUfAmUfCm | 4710 | mGpsfCpsmAfUmUfGmUfUmGfAmUf |
| siNA- | | AfAmCfAmAfUmGfCTpsT | | AmAfUmGfUmUfGmUpsTpsT |
| 106 | | | | |
| ds- | 4489 | mApsfApsmAfCmCfUmAfCmAfAmGf | 4711 | fGpsmGpsfAmAfCmCfAmCfCmUfUm |
| siNA- | | GmUfGmGfUmUfCmCpsTpsT | | GfUmAfGmGfUmUfUTpsT |
| 107 | | | | |
| ds- | 4490 | fCpsmGpsfUmUfUmUfUmAfAmAfC | 4712 | mGpsfCpsmAfAmAfCmCfCmGfUmUf |
| siNA- | | mGfGmGfUmUfUmGfCTpsT | | UmAfAmAfAmAfCmGpsTpsT |
| 108 | | | | |
| ds- | 4491 | mGpsfUpsmGfCmCfGmCfAmCfGmGf | 4713 | fGpsmUpsfCmUfUmAfCmAfCmCfGm |
| siNA- | | UmGfUmAfAmGfAmCpsTpsT | | UfGmCfGmGfCmAfCTpsT |
| 109 | | | | |
| ds- | 4492 | fUpsmApsfCmCfAmCfAmUfAmUfAm | 4714 | mUpsfGpsmAfCmGfUmGfAmUfAmUf |
| siNA- | | UfCmAfCmGfUmCfATpsT | | AmUfGmUfGmGfUmApsTpsT |
| 110 | | | | |
| ds- | 4493 | mGpsfCpsmUfAmUfGmUfAmAfGmU | 4715 | fGpsmGpsfAmUfGmUfAmAfAmCfUm |
| siNA- | | fUmUfAmCfAmUfCmCpsTpsT | | UfAmCfAmUfAmGfCTpsT |
| 111 | | | | |
| ds- | 4494 | mApsfCpsmCfGmGfGmUfUmUfGmA | 4716 | fUpsmCpsfAmAfAmCfUmGfUmCfAm |
| siNA- | | fCmAfGmUfUmUfGmApsTpsT | | AfAmCfCmCfGmGfUTpsT |
| 112 | | | | |
| ds- | 4495 | fUpsmGpsfUmCfAmAfAmCfCmCfGm | 4717 | mApsfApsmAfAmUfUmAfCmCfGmGf |
| siNA- | | GfUmAfAmUfUmUfUTpsT | | GmUfUmUfGmAfCmApsTpsT |
| 113 | | | | |
| ds- | 4496 | fUpsmApsfAmGfUmAfUmGfCmCfA | 4718 | mUpsfGpsmCfAmCfUmAfAmUfGmGf |
| siNA- | | mUfUmAfGmUfGmCfATpsT | | CmAfUmAfCmUfUmApsTpsT |
| 114 | | | | |
| ds- | 4497 | mApsfUpsmUfCmUfUmUfGmCfAmCf | 4719 | fUpsmGpsfCmCfAmUfUmAfGmUfGm |
| siNA- | | UmAfAmUfGmGfCmApsTpsT | | CfAmAfAmGfAmAfUTpsT |
| 115 | | | | |
| ds- | 4498 | mGpsfCpsmGfAmGfCmUfCmUfAmUf | 4720 | fUpsmGpsfCmAfAmAfGmAfAmUfAm |
| siNA- | | UmCfUmUfUmGfCmApsTpsT | | GfAmGfCmUfCmGfCTpsT |
| 116 | | | | |
| ds- | 4499 | mGpsfApsmCfAmCfCmAfGmCfUmAf | 4721 | fUpsmCpsfGmCfAmCfCmGfUmAfGm |
| siNA- | | CmGfGmUfGmCfGmApsTpsT | | CfUmGfGmUfGmUfCTpsT |
| 117 | | | | |
| ds- | 4500 | fCpsmApsfAmUfAmGfCmCfGmCfCm | 4722 | mCpsfCpsmUfCmUfAmGfUmGfGmCf |
| siNA- | | AfCmUfAmGfAmGfGTpsT | | GmGfCmUfAmUfUmGpsTpsT |
| 118 | | | | |
| ds- | 4501 | mCpsfApsmCfUmAfUmUfAmGfCmAf | 4723 | fApsmCpsfUmGfCmUfUmAfUmGfCm |
| siNA- | | UmAfAmGfCmAfGmUpsTpsT | | UfAmAfUmAfGmUfGTpsT |
| 119 | | | | |
| ds- | 4502 | fApsmUpsfCmAfGmGfAmGfUmAfU | 4724 | mApsfCpsmAfUmCfAmGfCmAfUmAf |
| siNA- | | mGfCmUfGmAfUmGfUTpsT | | CmUfCmCfUmGfAmUpsTpsT |
| 120 | | | | |
| ds- | 4503 | mUpsfApsmAfUmAfGmCfUmCfAmU | 4725 | fUpsmApsfGmGfAmGfGmUfAmUfGm |
| siNA- | | fAmCfCmUfCmCfUmApsTpsT | | AfGmCfUmAfUmUfATpsT |
| 121 | | | | |
| ds- | 4504 | fApsmCpsfUmAfUmGfGmUfGmAfU | 4726 | mApsfCpsmAfAmCfAmGfCmAfUmCf |
| siNA- | | mGfCmUfGmUfUmGfUTpsT | | AmCfCmAfUmAfGmUpsTpsT |
| 122 | | | | |
| ds- | 4505 | fUpsmGpsfCmCfAmCfAmAfGmAfGm | 4727 | mApsfCpsmAfUmAfGmUfGmCfUmCf |
| siNA- | | CfAmCfUmAfUmGfUTpsT | | UmUfGmUfGmGfCmApsTpsT |
| 123 | | | | |
| ds- | 4506 | mUpsfApsmUfAmCfAmCfUmAfUmG | 4728 | fUpsmCpsfUmGfCmUfCmGfCmAfUm |
| siNA- | | fCmGfAmGfCmAfGmApsTpsT | | AfGmUfGmUfAmUfATpsT |
| 124 | | | | |
| ds- | 4507 | fApsmApsfUmUfCmAfAmAfGmUfG | 4729 | mGpsfUpsmUfGmAfAmUfUmCfAmCf |
| siNA- | | mAfAmUfUmCfAmAfCTpsT | | UmUfUmGfAmAfUmUpsTpsT |
| 125 | | | | |
| ds- | 4508 | mApsfGpsmGfAmAfCmAfUmGfUmC | 4730 | fUpsmApsfGmGfUmCfCmAfGmAfCm |
| siNA- | | fUmGfGmAfCmCfUmApsTpsT | | AfUmGfUmUfCmCfUTpsT |
| 126 | | | | |
| ds- | 4509 | mUpsfGpsmAfAmUfAmUfGmAfCmA | 4731 | fUpsmApsfUmGfAmCfUmAfUmGfUm |
| siNA- | | fUmAfGmUfCmAfUmApsTpsT | | CfAmUfAmUfUmCfATpsT |
| 127 | | | | |
| ds- | 4510 | fUpsmUpsfUmGfAmGfCmUfUmUfG | 4732 | mGpsfCpsmUfUmAfGmCfCmCfAmAf |
| siNA- | | mGfGmCfUmAfAmGfCTpsT | | AmGfCmUfCmAfAmApsTpsT |
| 128 | | | | |
| ds- | 4511 | mUpsfUpsmUfGmCfGmAfCmAfUmU | 4733 | fUpsmApsfAmUfGmAfUmGfAmAfUm |
| siNA- | | fCmAfUmCfAmUfUmApsTpsT | | GfUmCfGmCfAmAfATpsT |
| 129 | | | | |
| ds- | 4512 | fGpsmApsfGmUfAmCfGmAfAmCfU | 4734 | mApsfGpsmUfAmCfAmUfAmAfGmUf |
| siNA- | | mUfAmUfGmUfAmCfUTpsT | | UmCfGmUfAmCfUmCpsTpsT |
| 130 | | | | |
| ds- | 4513 | fGpsmGpsfUmAfCmGfUmUfAmAfU | 4735 | mUpsfApsmUfUmAfAmCfUmAfUmUf |
| siNA- | | mAfGmUfUmAfAmUfATpsT | | AmAfCmGfUmAfCmCpsTpsT |
| 131 | | | | |
| ds- | 4514 | mGpsfApsmAfAmAfAmGfAmAfGmU | 4736 | fApsmApsfUmAfGmCfGmUfAmCfUm |
| siNA- | | fAmCfGmCfUmAfUmUpsTpsT | | UfCmUfUmUfUmUfCTpsT |
| 132 | | | | |
| ds- | 4515 | mGpsfCpsmAfAmGfAmAfUmAfCmCf | 4737 | fGpsmCpsfUmUfUmCfGmUfGmGfUm |
| siNA- | | AmCfGmAfAmAfGmCpsTpsT | | AfUmUfCmUfUmGfCTpsT |
| 133 | | | | |
| ds- | 4516 | fCpsmUpsfUmAfCmUfGmCfGmCfUm | 4738 | mApsfCpsmAfAmUfCmGfAmAfGmCf |
| siNA- | | UfCmGfAmUfUmGfUTpsT | | GmCfAmGfUmAfAmGpsTpsT |
| 134 | | | | |
| ds- | 4517 | fUpsmUpsfCmUfGmGfUmCfUmAfA | 4739 | mUpsfApsmGfUmUfCmGfUmUfUmAf |
| siNA- | | mAfCmGfAmAfCmUfATpsT | | GmAfCmCfAmGfAmApsTpsT |
| 135 | | | | |
| ds- | 4518 | mUpsfApsmAfUmAfAmGfAmAfAmG | 4740 | fCpsmApsfCmGfAmAfCmGfCmUfUm |
| siNA- | | fCmGfUmUfCmGfUmGpsTpsT | | UfCmUfUmAfUmUfATpsT |
| 136 | | | | |
| ds- | 4519 | fUpsmCpsfAmGfGmUfUmUfUmGfC | 4741 | mUpsfGpsmUfAmUfGmCfAmGfCmAf |
| siNA- | | mUfGmCfAmUfAmCfATpsT | | AmAfAmCfCmUfGmApsTpsT |
| 137 | | | | |
| ds- | 4520 | mCpsfApsmUfCmUfGmUfUmGfUmCf | 4742 | fCpsmApsfGmUfAmAfGmUfGmAfCm |
| siNA- | | AmCfUmUfAmCfUmGpsTpsT | | AfAmCfAmGfAmUfGTpsT |
| 138 | | | | |
| ds- | 4521 | mGpsfApsmCfGmCfAmGfUmAfUmU | 4743 | fUpsmApsfCmCfCmAfAmUfAmAfUm |
| siNA- | | fAmUfUmGfGmGfUmApsTpsT | | AfCmUfGmCfGmUfCTpsT |
| 139 | | | | |
| ds- | 4522 | fApsmApsfAmUfUmGfGmCfUmAfC | 4744 | mCpsfUpsmUfCmGfGmUfAmGfUmAf |
| siNA- | | mUfAmCfCmGfAmAfGTpsT | | GmCfCmAfAmUfUmUpsTpsT |
| 140 | | | | |
| ds- | 4523 | fCpsmApsfAmAfAmGfGmCfUmUfCm | 4745 | mUpsfCpsmUfGmCfGmUfAmGfAmAf |
| siNA- | | UfAmCfGmCfAmGfATpsT | | GmCfCmUfUmUfUmGpsTpsT |
| 141 | | | | |
| ds- | 4524 | fUpsmGpsfUmCfAmCfUmAfAmGfA | 4746 | mApsfGpsmCfAmGfAmUfUmUfCmUf |
| siNA- | | mAfAmUfCmUfGmCfUTpsT | | UmAfGmUfGmAfCmApsTpsT |
| 142 | | | | |
| ds- | 4525 | mUpsfUpsmGfUmAfAmUfCmAfGmU | 4747 | fGpsmApsfCmAfAmGfGmAfAmCfUm |
| siNA- | | fUmCfCmUfUmGfUmCpsTpsT | | GfAmUfUmAfCmAfATpsT |
| 143 | | | | |
| ds- | 4526 | fCpsmApsfUmGfGmAfAmGfUmCfA | 4748 | mCpsfGpsmAfAmGfGmUfGmUfGmAf |
| siNA- | | mCfAmCfCmUfUmCfGTpsT | | CmUfUmCfCmAfUmGpsTpsT |
| 144 | | | | |
| ds- | 4527 | fUpsmCpsfUmAfCmUfCmUfUmGfUm | 4749 | mCpsfApsmUfUmCfUmGfCmAfCmAf |
| siNA- | | GfCmAfGmAfAmUfGTpsT | | AmGfAmGfUmAfGmApsTpsT |
| 145 | | | | |
| ds- | 4528 | fCpsmApsfCmAfUmAfGmCfAmAfUm | 4750 | mGpsfApsmUfUmAfAmAfGmAfUmUf |
| siNA- | | CfUmUfUmAfAmUfCTpsT | | GmCfUmAfUmGfUmGpsTpsT |
| 146 | | | | |
| ds- | 4529 | fUpsmGpsfAmAfAmGfAmGfCmCfA | 4751 | mApsfApsmAfUmGfUmGfGmUfGmGf |
| siNA- | | mCfCmAfCmAfUmUfUTpsT | | CmUfCmUfUmUfCmApsTpsT |
| 147 | | | | |
| ds- | 4530 | fApsmApsfGmAfGmCfCmCfUmAfAm | 4752 | mUpsfUpsmUfAmCfAmCfAmUfUmAf |
| siNA- | | UfGmUfGmUfAmAfATpsT | | GmGfGmCfUmCfUmUpsTpsT |
| 148 | | | | |
| ds- | 4531 | mUpsfGpsmCfAmAfCmAfCmGfGmAf | 4753 | fUpsmApsfCmGfGmUfUmUfCmGfUm |
| siNA- | | CmGfAmAfAmCfCmGfUmApsTpsT | | CfCmGfUmGfUmUfGmCpsfA |
| 149 | | | | |
| ds- | 4532 | fApsmApsfAmCfAmCfAmCfGmUfCm | 4754 | mApsfApsmCfUmGfAmGfUmUfGmGf |
| siNA- | | CfAmAfCmUfCmAfGmUpsfU | | AmCfGmUfGmUfGmUfUmUpsTpsT |
| 150 | | | | |
| ds- | 4533 | mApsfUpsmGfAmAfCmAfCmAfUmA | 4755 | fUpsmGpsfAmAfCmAfGmCfCmCfUm |
| siNA- | | fGmGfGmCfUmGfUmUfCmApsTpsT | | AfUmGfUmGfUmUfCmApsfU |
| 151 | | | | |
| ds- | 4534 | fUpsmApsfUmUfUmAfAmAfAmCfU | 4756 | mApsfUpsmUfGmUfCmAfGmUfAmAf |
| siNA- | | mUfAmCfUmGfAmCfAmApsfU | | GmUfUmUfUmAfAmAfUmApsTpsT |
| 152 | | | | |
| ds- | 4535 | fCpsmUpsfCmUfGmAfAmGfAmAfG | 4757 | mUpsfUpsmUfUmCfCmAfCmUfAmCf |
| siNA- | | mUfAmGfUmGfGmAfAmApsfA | | UmUfCmUfUmCfAmGfAmGpsTpsT |
| 153 | | | | |
| ds- | 4536 | fGpsmUpsfGmGfUmAfGmUfGmUfU | 4758 | mUpsfGpsmUfUmAfAmAfAmCfCmAf |
| siNA- | | mGfGmUfUmUfUmAfAmCpsfA | | AmCfAmCfUmAfCmCfAmCpsTpsT |
| 154 | | | | |
| ds- | 4537 | fApsmCpsfCmAfCmCfUmUfGmUfAm | 4759 | mGpsfUpsmAfAmCfAmAfAmCfCmUf |
| siNA- | | GfGmUfUmUfGmUfUmApsfC | | AmCfAmAfGmGfUmGfGmUpsTpsT |
| 155 | | | | |
| ds- | 4538 | mUpsfApsmCfCmAfGmUfGmUfGmU | 4760 | fUpsmGpsfUmUfGmUfGmUfAmCfAm |
| siNA- | | fGmUfAmCfAmCfAmAfCmApsTpsT | | CfAmCfAmCfUmGfGmUpsfA |
| 156 | | | | |
| ds- | 4539 | mApsfCpsmAfAmCfUmAfCmAfGmCf | 4761 | fApsmApsfAmGfGmUfUmAfUmGfGm |
| siNA- | | CmAfUmAfAmCfCmUfUmUpsTpsT | | CfUmGfUmAfGmUfUmGpsfU |
| 157 | | | | |
| ds- | 4540 | fUpsmUpsfAmAfAmCfGmGfGmUfU | 4762 | mUpsfUpsmAfCmAfCmCfGmCfAmAf |
| siNA- | | mUfGmCfGmGfUmGfUmApsfA | | AmCfCmCfGmUfUmUfAmApsTpsT |
| 158 | | | | |
| ds- | 4541 | mUpsfApsmAfGmAfCmGfGmGfCmU | 4763 | fGpsmUpsfGmUfAmAfGmUfGmCfAm |
| siNA- | | fGmCfAmCfUmUfAmCfAmCpsTpsT | | GfCmCfCmGfUmCfUmUpsfA |
| 159 | | | | |
| ds- | 4542 | fApsmCpsfAmUfGmGfUmAfCmCfAm | 4764 | mGpsfUpsmGfAmUfAmUfAmUfGmUf |
| siNA- | | CfAmUfAmUfAmUfCmApsfC | | GmGfUmAfCmCfAmUfGmUpsTpsT |
| 160 | | | | |
| ds- | 4543 | fUpsmCpsfAmAfAmCfUmGfUmCfAm | 4765 | mUpsfUpsmAfCmCfGmGfGmUfUmUf |
| siNA- | | AfAmCfCmCfGmGfUmApsfA | | GmAfCmAfGmUfUmUfGmApsTpsT |
| 161 | | | | |
| ds- | 4544 | mUpsfGpsmAfGmCfAmAfAmGfAmA | 4766 | fApsmApsfAmAfCmAfCmUfUmCfUm |
| siNA- | | fGmAfAmGfUmGfUmUfUmUpsTpsT | | UfCmUfUmUfGmCfUmCpsfA |
| 162 | | | | |
| ds- | 4545 | fUpsmUpsfGmAfUmUfGmUfUmAfC | 4767 | mApsfGpsmCfCmAfCmCfAmUfCmGf |
| siNA- | | mGfAmUfGmGfUmGfGmCpsfU | | UmAfAmCfAmAfUmCfAmApsTpsT |
| 163 | | | | |
| ds- | 4546 | fApsmApsfAmUfGmAfAmUfCmUfU | 4768 | mUpsfGpsmGfCmAfUmAfCmUfUmAf |
| siNA- | | mAfAmGfUmAfUmGfCmCpsfA | | AmGfAmUfUmCfAmUfUmUpsTpsT |
| 164 | | | | |
| ds- | 4547 | fUpsmApsfUmGfCmCfAmUfUmAfG | 4769 | mApsfUpsmUfCmUfUmUfGmCfAmCf |
| siNA- | | mUfGmCfAmAfAmGfAmApsfU | | UmAfAmUfGmGfCmAfUmApsTpsT |
| 165 | | | | |
| ds- | 4548 | fUpsmGpsfCmCfAmUfUmAfGmUfG | 4770 | mCpsfUpsmAfUmUfCmUfUmUfGmCf |
| siNA- | | mCfAmAfAmGfAmAfUmApsfG | | AmCfUmAfAmUfGmGfCmApsTpsT |
| 166 | | | | |
| ds- | 4549 | fApsmGpsfAmAfUmAfGmAfGmCfU | 4771 | mCpsfUpsmAfCmGfGmUfGmCfGmAf |
| siNA- | | mCfGmCfAmCfCmGfUmApsfG | | GmCfUmCfUmAfUmUfCmUpsTpsT |
| 167 | | | | |
| ds- | 4550 | mCpsfApsmGfCmUfAmCfGmGfUmGf | 4772 | fApsmUpsfAmGfAmGfCmUfCmGfCm |
| siNA- | | CmGfAmGfCmUfCmUfAmUpsTpsT | | AfCmCfGmUfAmGfCmUpsfG |
| 168 | | | | |
| ds- | 4551 | fUpsmCpsfGmCfAmCfCmGfUmAfGm | 4773 | mGpsfApsmGfAmCfAmCfCmAfGmCf |
| siNA- | | CfUmGfGmUfGmUfCmUpsfC | | UmAfCmGfGmUfGmCfGmApsTpsT |
| 169 | | | | |
| ds- | 4552 | fApsmApsfCmUfGmCfUmUfAmUfG | 4774 | mApsfCpsmAfCmUfAmUfUmAfGmCf |
| siNA- | | mCfUmAfAmUfAmGfUmGpsfU | | AmUfAmAfGmCfAmGfUmUpsTpsT |
| 170 | | | | |
| ds- | 4553 | fGpsmApsfCmUfGmAfGmAfCmUfG | 4775 | mUpsfUpsmAfGmUfAmAfGmGfUmCf |
| siNA- | | mAfCmCfUmUfAmCfUmApsfA | | AmGfUmCfUmCfAmGfUmCpsTpsT |
| 171 | | | | |
| ds- | 4554 | fGpsmApsfGmUfAmCfAmCfCmUfUm | 4776 | mApsfCpsmCfUmUfUmUfUmCfAmAf |
| siNA- | | UfGmAfAmAfAmAfGmGpsfU | | AmGfGmUfGmUfAmCfUmCpsTpsT |
| 172 | | | | |
| ds- | 4555 | fUpsmGpsfGmUfAmCfUmGfGmUfA | 4777 | mApsfApsmAfUmGfAmCfUmCfUmUf |
| siNA- | | mAfGmAfGmUfCmAfUmUpsfU | | AmCfCmAfGmUfAmCfCmApsTpsT |
| 173 | | | | |
| ds- | 4556 | fUpsmCpsfUmGfCmUfAmAfUmCfUm | 4778 | mApsfGpsmUfAmGfCmAfGmCfAmAf |
| siNA- | | UfGmCfUmGfCmUfAmCpsfU | | GmAfUmUfAmGfCmAfGmApsTpsT |
| 174 | | | | |
| ds- | 4557 | fGpsmUpsfAmCfGmUfUmAfAmUfA | 4779 | mCpsfGpsmCfUmAfUmUfAmAfCmUf |
| siNA- | | mGfUmUfAmAfUmAfGmCpsfG | | AmUfUmAfAmCfGmUfAmCpsTpsT |
| 175 | | | | |
| ds- | 4558 | fUpsmUpsfCmUfUmGfCmUfUmUfCm | 4780 | mApsfGpsmAfAmUfAmCfCmAfCmGf |
| siNA- | | GfUmGfGmUfAmUfUmCpsfU | | AmAfAmGfCmAfAmGfAmApsTpsT |
| 176 | | | | |
| ds- | 4559 | fCpsmUpsfUmAfCmUfGmCfGmCfUm | 4781 | mApsfCpsmAfCmAfAmUfCmGfAmAf |
| siNA- | | UfCmGfAmUfUmGfUmGpsfU | | GmCfGmCfAmGfUmAfAmGpsTpsT |
| 177 | | | | |
| ds- | 4560 | fCpsmGpsfCmUfUmCfGmAfUmUfGm | 4782 | mApsfGpsmUfAmCfGmCfAmCfAmCf |
| siNA- | | UfGmUfGmCfGmUfAmCpsfU | | AmAfUmCfGmAfAmGfCmGpsTpsT |
| 178 | | | | |
| ds- | 4561 | fCpsmGpsfUmAfCmUfGmCfUmGfCm | 4783 | mUpsfApsmAfCmAfAmUfAmUfUmGf |
| siNA- | | AfAmUfAmUfUmGfUmUpsfA | | CmAfGmCfAmGfUmAfCmGpsTpsT |
| 179 | | | | |
| ds- | 4562 | mUpsfCpsmGfUmUfUmAfGmAfCmCf | 4784 | fCpsmUpsfGmAfUmCfUmUfCmUfGm |
| siNA- | | AmGfAmAfGmAfUmCfAmGpsTpsT | | GfUmCfUmAfAmAfCmGpsfA |
| 180 | | | | |
| ds- | 4563 | mGpsfUpsmAfAmUfAmAfGmAfAmA | 4785 | fUpsmCpsfAmCfGmAfAmCfGmCfUm |
| siNA- | | fGmCfGmUfUmCfGmUfGmApsTpsT | | UfUmCfUmUfAmUfUmApsfC |
| 181 | | | | |
| ds- | 4564 | mApsfApsmUfAmAfUmUfUmUfCmA | 4786 | fUpsmApsfAmAfCmGfAmAfCmAfUm |
| siNA- | | fUmGfUmUfCmGfUmUfUmApsTpsT | | GfAmAfAmAfUmUfAmUpsfU |
| 182 | | | | |
| ds- | 4565 | mApsfApsmGfCmAfCmAfAmAfUmA | 4787 | fApsmApsfUmUfGmAfCmUfUmCfUm |
| siNA- | | fGmAfAmGfUmCfAmAfUmUpsTpsT | | AfUmUfUmGfUmGfCmUpsfU |
| 183 | | | | |
| ds- | 4566 | mApsfApsmCfCmAfAmGfAmCfGmCf | 4788 | fCpsmApsfAmUfAmAfUmAfCmUfGm |
| siNA- | | AmGfUmAfUmUfAmUfUmGpsTpsT | | CfGmUfCmUfUmGfGmUpsfU |
| 184 | | | | |
| ds- | 4567 | fApsmUpsfUmGfGmCfUmAfCmUfA | 4789 | mApsfGpsmCfUmCfUmUfCmGfGmUf |
| siNA- | | mCfCmGfAmAfGmAfGmCpsfU | | AmGfUmAfGmCfCmAfAmUpsTpsT |
| 185 | | | | |
| ds- | 4568 | fCpsmGpsfUmGfCmUfAmCfAmAfCm | 4790 | mCpsfCpsmUfUmGfAmGfGmAfAmGf |
| siNA- | | UfUmCfCmUfCmAfAmGpsfG | | UmUfGmUfAmGfCmAfCmGpsTpsT |
| 186 | | | | |
| ds- | 4569 | fGpsmApsfUmUfGmAfAmCfCmAfG | 4791 | mUpsfGpsmCfUmCfUmCfAmAfGmCf |
| siNA- | | mCfUmUfGmAfGmAfGmCpsfA | | UmGfGmUfUmCfAmAfUmCpsTpsT |
| 187 | | | | |
| ds- | 4570 | fUpsmGpsfGmUfAmAfAmGfGmCfC | 4792 | mUpsfGpsmUfUmGfUmUfGmUfUmGf |
| siNA- | | mAfAmCfAmAfCmAfAmCpsfA | | GmCfCmUfUmUfAmCfCmApsTpsT |
| 188 | | | | |
| ds- | 4571 | mGpsfCpsmCfUmCfAmGfCmAfGmCf | 4793 | fUpsmApsfAmGfAmAfAmUfCmUfGm |
| siNA- | | AmGfAmUfUmUfCmUfUmApsTpsT | | CfUmGfCmUfGmAfGmGpsfC |
| 189 | | | | |
| ds- | 4572 | fApsmGpsfAmCfAmAfGmGfAmAfC | 4794 | mUpsfUpsmUfGmUfAmAfUmCfAmGf |
| siNA- | | mUfGmAfUmUfAmCfAmApsfA | | UmUfCmCfUmUfGmUfCmUpsTpsT |
| 190 | | | | |
| ds- | 4573 | fApsmApsfAmUfUmGfGmAfUmGfA | 4795 | mUpsfGpsmGfAmUfCmUfUmUfGmUf |
| siNA- | | mCfAmAfAmGfAmUfCmCpsfA | | CmAfUmCfCmAfAmUfUmUpsTpsT |
| 191 | | | | |
| ds- | 4574 | fCpsmApsfCmCfAmAfCmAfGmAfGm | 4796 | mCpsfCpsmUfUmUfUmUfAmGfGmCf |
| siNA- | | CfCmUfAmAfAmAfAmGpsfG | | UmCfUmGfUmUfGmGfUmGpsTpsT |
| 192 | | | | |
| ds- | 4575 | mApsfUpsmUfCmAfUmUfCmUfGmCf | 4797 | fCpsmUpsfAmCfUmCfUmUfGmUfGm |
| siNA- | | AmCfAmAfGmAfGmUfAmGpsTpsT | | CfAmGfAmAfUmGfAmApsfU |
| 193 | | | | |
| ds- | 4576 | mUpsfCpsmGfAmUfCmGfUmAfCmUf | 4798 | fGpsmGpsfCmCfAmCfGmCfGmGfAm |
| siNA- | | CmCfGmCfGmUfGmGfCmCpsTpsT | | GfUmAfCmGfAmUfCmGpsfA |
| 194 | | | | |
| ds- | 4577 | mUpsfUpsmUfUmAfCmAfCmAfUmU | 4799 | fGpsmApsfAmGfAmGfCmCfCmUfAm |
| siNA- | | fAmGfGmGfCmUfCmUfUmCpsTpsT | | AfUmGfUmGfUmAfAmApsfA |
| 195 | | | | |
| ds- | 4578 | mApsmGpsmAmCfAmAmGmGfAfAf | 4800 | vmUpsfUpsmUmGmUmAmAmUmCm |
| siNA- | | CmUmGfAmUmUmAmCfAmApsmA | | AmGmUmUfCmCmUmUmGmUmCm |
| 196 | | | | UpsTpsT |
| ds- | 4579 | fApsmApsfCmUfGmCfUmUfAmUfG | 4801 | vmApsfCpsmAfCmUfAmUfUmAfGmC |
| siNA- | | mCfUmAfAmUfAmGfUmGpsfU | | fAmUfAmAfGmCfAmGfUmUpsTpsT |
| 197 | | | | |
| ds- | 4580 | fUpsmUpsfCmUfUmGfCmUfUmUfCm | 4802 | vmApsfGpsmAfAmUfAmCfCmAfCmG |
| siNA- | | GfUmGfGmUfAmUfUmCpsfU | | fAmAfAmGfCmAfAmGfAmApsTpsT |
| 198 | | | | |
| ds- | 4581 | fCpsmUpsfAmCfUmCfUmUfGmUfGm | 4803 | vmApsfUpsmUfCmAfUmUfCmUfGmC |
| siNA- | | CfAmGfAmAfUmGfAmApsfU | | fAmCfAmAfGmAfGmUfAmGpsTpsT |
| 199 | | | | |
| ds- | 4582 | fUpsmUpsfGmAfAmGfGmUfGmUfC | 4804 | mCpsfApsmAfAmCfAmGfAmGfAmCf |
| siNA- | | mUfCmUfGmUfUmUfGTpsT | | AmCfCmUfUmCfAmApsTpsT |
| 200 | | | | |
| ds- | 4583 | mApsfApsmGfUmCfAmAfCmAfCmCf | 4805 | fUpsmUpsfGmUfUmAfAmUfGmGfUm |
| siNA- | | AmUfUmAfAmCfAmApsTpsT | | GfUmUfGmAfCmUfUTpsT |
| 201 | | | | |
| ds- | 4584 | mUpsfCpsmAfAmCfUmGfUmUfGmCf | 4806 | fUpsmUpsfAmCfUmUfUmUfGmCfAm |
| siNA- | | AmAfAmAfGmUfAmApsTpsT | | AfCmAfGmUfUmGfATpsT |
| 202 | | | | |
| ds- | 4585 | mUpsfCpsmAfUmAfAmCfAmAfAmCf | 4807 | fApsmUpsfGmCfUmGfGmUfGmUfUm |
| siNA- | | AmCfCmAfGmCfAmUpsTpsT | | UfGmUfUmAfUmGfATpsT |
| 203 | | | | |
| ds- | 4586 | mGpsfUpsmAfGmUfUmGfCmAfUmC | 4808 | fCpsmUpsfUmCfUmGfGmUfGmAfUm |
| siNA- | | fAmCfCmAfGmAfAmGpsTpsT | | GfCmAfAmCfUmAfCTpsT |
| 204 | | | | |
| ds- | 4587 | fUpsmGpsfCmUfCmAfCmAfGmCfAm | 4809 | mGpsfCpsmAfUmAfGmUfGmUfGmCf |
| siNA- | | CfAmCfUmAfUmGfCTpsT | | UmGfUmGfAmGfCmApsTpsT |
| 205 | | | | |
| ds- | 4588 | fApsmGpsfAmUfGmCfGmGfUmGfA | 4810 | mGpsfUpsmAfAmAfCmAfAmUfCmAf |
| siNA- | | mUfUmGfUmUfUmAfCTpsT | | CmCfGmCfAmUfCmUpsTpsT |
| 206 | | | | |
| ds- | 4589 | mApsfUpsmCfUmAfCmUfUmUfCmUf | 4811 | fUpsmGpsfUmGfUmUfUmGfAmGfAm |
| siNA- | | CmAfAmAfCmAfCmApsTpsT | | AfAmGfUmAfGmAfUTpsT |
| 207 | | | | |
| ds- | 4590 | fUpsmUpsfUmAfAmUfGmUfUmAfG | 4812 | mApsfApsmGfCmAfUmCfAmCfUmAf |
| siNA- | | mUfGmAfUmGfCmUfUTpsT | | AmCfAmUfUmAfAmApsTpsT |
| 208 | | | | |
| ds- | 4591 | fApsmCpsfUmAfAmAfCmUfUmCfCm | 4813 | mCpsfGpsmUfAmAfUmAfAmGfGmAf |
| siNA- | | UfUmAfUmUfAmCfGTpsT | | AmGfUmUfUmAfGmUpsTpsT |
| 209 | | | | |
| ds- | 4592 | mUpsfUpsmUfGmUfAmAfUmCfAmG | 4814 | fApsmGpsfAmCfAmAfGmGfAmAfCm |
| siNA- | | fUmUfCmCfUmUfGmUfCmUpsTpsT | | UfGmAfUmUfAmCfAmAfATpsT |
| 210 | | | | |
| ds- | 4593 | fCpsmUpsfUmAfCmUfGmCfGmCfUm | 4815 | mApsfCpsmAfAmUfCmGfAmAfGmCf |
| siNA- | | UfCmGfAmUfUmGfUTpsT | | GmCfAmGfUmAfAmGpsTpsT |
| 211 | | | | |
| ds- | 4594 | mApsfCpsmAfCmUfAmUfUmAfGmCf | 4816 | fApsmApsfCmUfGmCfUmUfAmUfGm |
| siNA- | | AmUfAmAfGmCfAmGfUmUpsTpsT | | CfUmAfAmUfAmGfUmGfUTpsT |
| 212 | | | | |
| ds- | 4595 | mApsfGpsmAfAmUfAmCfCmAfCmGf | 4817 | fUpsmUpsfCmUfUmGfCmUfUmUfCm |
| siNA- | | AmAfAmGfCmAfAmGfAmApsTpsT | | GfUmGfGmUfAmUfUmCfUTpsT |
| 213 | | | | |
| ds- | 4596 | mApsfCpsmAfCmAfAmUfCmGfAmAf | 4818 | fCpsmUpsfUmAfCmUfGmCfGmCfUm |
| siNA- | | GmCfGmCfAmGfUmAfAmGpsTpsT | | UfCmGfAmUfUmGfUmGfUTpsT |
| 214 | | | | |
| ds- | 4597 | fCpsmUpsfAmCfUmCfUmUfGmUfGm | 4819 | mApsfUpsmUfCmAfUmUfCmUfGmCf |
| siNA- | | CfAmGfAmAfUmGfAmAfUTpsT | | AmCfAmAfGmAfGmUfAmGpsTpsT |
| 215 | | | | |
| ds- | 4598 | fUpsmUpsfUmCfUmCfAmAfCmUfAm | 4820 | mApsfGpsmGfAmAfGmUfUmUfAmGf |
| siNA- | | AfAmCfUmUfCmCfUpsTpsT | | UmUfGmAfGmAfAmApsTpsT |
| 216 | | | | |
| ds- | 4599 | mApsmGpsmAmCfAmAmGmGfAfAf | 4821 | vmUpsfUpsmUmGmUmAmAmUmCm |
| siNA- | | CmUmGfAmUmUmAmCfAmAmA | | AmGmUmUfCmCmUmUmGmUmCm |
| 217 | | | | UpsTpsT |
| ds- | 4600 | mApsmGpsmAmCmAmAfGmGfAfAf | 4822 | vmUpsfUpsmUmGmUfAmAmUmCmA |
| siNA- | | CmUmGmAmUmUmAmCmAmAmA | | mGmUmUfCmCfUmUmGmUmCmUps |
| 218 | | | | mUpsmU |
| ds- | 4601 | mApsmGpsmAmCmAmAfGmGfAfAf | 4823 | vmUpsfUpsmUmGfUmAmAfUmCmA |
| siNA- | | CmUmGmAmUmUmAmCmAmAmA | | mGmUmUfCmCmUfUmGmUfCmUps |
| 219 | | | | mUpsmU |
| ds- | 4602 | fCpsmUpsfAmCfUmCfUmUfGmUfGm | 4824 | vmApsfUpsmUfCmAfUmUfCmUfGmC |
| siNA- | | CfAmGfAmAfUmGfAmAfU | | fAmCfAmAfGmAfGmUfAmGpsTpsT |
| 220 | | | | |
| ds- | 4603 | mCpsmUpsmAmCmUmCfUmUfGfUf | 4825 | vmApsfUpsmUmCmAfUmUmCmUmG |
| siNA- | | GmCmAmGmAmAmUmGmAmAmU | | mCmAmCfAmAfGmAmGmUmAmGps |
| 221 | | | | mUpsmU |
| ds- | 4604 | mCpsmUpsmAmCmUmCfUmUfGfUf | 4826 | vmApsfUpsmUmCfAmUmUfCmUmG |
| siNA- | | GmCmAmGmAmAmUmGmAmAmU | | mCmAmCfAmAmGfAmGmUfAmGps |
| 222 | | | | mUpsmU |
| ds- | 4827 | mApsmGpsmAmCfAmAmGmGfAfAf | 4829 | vmUpsfUpsmUmGmUmAmAmUmCm |
| siNA- | | CmUmGfAmUmUmAmCfApsmApsm | | AmGmUmUfCmCmUmUmGmUmCm |
| 223 | | A | | UpsmUpsmU |
| ds- | 4828 | fCpsmUpsfAmCfUmCfUmUfGmUfGm | 4830 | vmApsfUpsmUfCmAfUmUfCmUfGmC |
| siNA- | | CfAmGfAmAfUmGfApsmApsfU | | fAmCfAmAfGmAfGmUfAmGpsmUps |
| 224 | | | | mU |

mX = 2′-O-methyl nucleotide;
fX = 2′-fluoro nucleotide;
ps = phosphorothioate linkage;
vX = 5′ vinyl phosphonate nucleotide;
vmX = 5′ vinyl phosphonate, 2′-O-methyl nucleotide

[0218] In some embodiments, a siNA of the present disclosure may comprise a sense strand selected from any one of SEQ ID NOs: 4383 to 4604, 4827, and 4828. In some embodiments, a siNA of the present disclosure may comprise an antisense strand selected from any one of SEQ ID NOs: 4605 to 4826, 4829, and 4830. In some embodiments, a siNA of the present disclosure may comprise a sense strand selected from any one of SEQ ID NOs: 4383 to 4604, 4827, and 4828 and an antisense strand selected from any one of SEQ ID NOs: 4605 to 4826, 4829, and 4830. In some embodiments, a siNA of the present disclosure may comprise a sense strand and an antisense strand, respectively, selected from SEQ ID NOs:

4383 and 4605;
4384 and 4606;
4385 and 4607;
4386 and 4608;
4387 and 4609;
4388 and 4610;
4389 and 4611;
4390 and 4612;
4391 and 4613;
4392 and 4614;
4393 and 4615;
4394 and 4616;
4395 and 4617;
4396 and 4618;
4397 and 4619;
4398 and 4620;
4399 and 4621;
4400 and 4622;
4401 and 4623;
4402 and 4624;
4403 and 4625;
4404 and 4626;
4405 and 4627;
4406 and 4628;
4407 and 4629;
4408 and 4630;
4409 and 4631;
4410 and 4632;
4411 and 4633;
4412 and 4634;
4413 and 4635;
4414 and 4636;
4415 and 4637;
4416 and 4638;
4417 and 4639;
4418 and 4640;
4419 and 4641;
4420 and 4642;
4421 and 4643;
4422 and 4644;
4423 and 4645;
4424 and 4646;
4425 and 4647;
4426 and 4648;
4427 and 4649;
4428 and 4650;
4429 and 4651;
4430 and 4652;
4431 and 4653;
4432 and 4654;
4433 and 4655;
4434 and 4656;
4435 and 4657;
4436 and 4658;
4437 and 4659;
4438 and 4660;
4439 and 4661;
4440 and 4662;
4441 and 4663;
4442 and 4664;
4443 and 4665;
4444 and 4666;
4445 and 4667;
4446 and 4668;
4447 and 4669;
4448 and 4670;
4449 and 4671;
4450 and 4672;
4451 and 4673;
4452 and 4674;
4453 and 4675;
4454 and 4676;
4455 and 4677;
4456 and 4678;
4457 and 4679;
4458 and 4680;
4459 and 4681;
4460 and 4682;
4461 and 4683;
4462 and 4684;
4463 and 4685;
4464 and 4686;
4465 and 4687;
4466 and 4688;
4467 and 4689;
4468 and 4690;
4469 and 4691;
4470 and 4692;
4471 and 4693;
4472 and 4694;
4473 and 4695;
4474 and 4696;
4475 and 4697;
4476 and 4698;
4477 and 4699;
4478 and 4700;
4479 and 4701;
4480 and 4702;
4481 and 4703;
4482 and 4704;
4483 and 4705;
4484 and 4706;
4485 and 4707;
4486 and 4708;
4487 and 4709;
4488 and 4710;
4489 and 4711;
4490 and 4712;
4491 and 4713;
4492 and 4714;
4493 and 4715;
4494 and 4716;
4495 and 4717;
4496 and 4718;
4497 and 4719;
4498 and 4720;
4499 and 4721;
4500 and 4722;
4501 and 4723;
4502 and 4724;
4503 and 4725;
4504 and 4726;
4505 and 4727;
4506 and 4728;
4507 and 4729;
4508 and 4730;
4509 and 4731;
4510 and 4732;
4511 and 4733;
4512 and 4734;
4513 and 4735;
4514 and 4736;
4515 and 4737;
4516 and 4738;
4517 and 4739;
4518 and 4740;
4519 and 4741;
4520 and 4742;
4521 and 4743;
4522 and 4744;
4523 and 4745;
4524 and 4746;
4525 and 4747;
4526 and 4748;
4527 and 4749;
4528 and 4750;
4529 and 4751;
4530 and 4752;
4531 and 4753;
4532 and 4754;
4533 and 4755;
4534 and 4756;
4535 and 4757;
4536 and 4758;
4537 and 4759;
4538 and 4760;
4539 and 4761;
4540 and 4762;
4541 and 4763;
4542 and 4764;
4543 and 4765;
4544 and 4766;
4545 and 4767;
4546 and 4768;
4547 and 4769;
4548 and 4770;
4549 and 4771;
4550 and 4772;
4551 and 4773;
4552 and 4774;
4553 and 4775;
4554 and 4776;
4555 and 4777;
4556 and 4778;
4557 and 4779;
4558 and 4780;
4559 and 4781;
4560 and 4782;
4561 and 4783;
4562 and 4784;
4563 and 4785;
4564 and 4786;
4565 and 4787;
4566 and 4788;
4567 and 4789;
4568 and 4790;
4569 and 4791;
4570 and 4792;
4571 and 4793;
4572 and 4794;
4573 and 4795;
4574 and 4796;
4575 and 4797;
4576 and 4798;
4577 and 4799;
4578 and 4800;
4579 and 4801;
4580 and 4802;
4581 and 4803;
4582 and 4804;
4583 and 4805;
4584 and 4806;
4585 and 4807;
4586 and 4808;
4587 and 4809;
4588 and 4810;
4589 and 4811;
4590 and 4812;
4591 and 4813;
4592 and 4814;
4593 and 4815;
4594 and 4816;
4595 and 4817;
4596 and 4818;
4597 and 4819;
4598 and 4820;
4599 and 4821;
4600 and 4822;
4601 and 4823;
4602 and 4824;
4603 and 4825;
4604 and 4826;
4827 and 4829; &
4828 and 4830.

[0219] In some embodiments, the siNA can be selected from ds-siNA-196 (sense and antisense respectively comprising SEQ ID NOs: 4578 and 4800), ds-siNA-197 (sense and antisense respectively comprising SEQ ID NOs: 4579 and 4801), ds-siNA-198 (sense and antisense respectively comprising SEQ ID NOs: 4580 and 4802), ds-siNA-199 (sense and antisense respectively comprising SEQ ID NOs: 4581 and 4803), ds-siNA-217 (sense and antisense respectively comprising SEQ ID NOs: 4599 and 4821), ds-siNA-218 (sense and antisense respectively comprising SEQ ID NOs: 4600 and 4822), ds-siNA-219 (sense and antisense respectively comprising SEQ ID NOs: 4601 and 4823), ds-siNA-220 (sense and antisense respectively comprising SEQ ID NOs: 4602 and 4824), ds-siNA-221 (sense and antisense respectively comprising SEQ ID NOs: 4603 and 4825), and ds-siNA-222 (sense and antisense respectively comprising SEQ ID NOs: 4604 and 4826).

[0220] In some embodiments, the siNA can be selected from ds-siNA-196 (sense and antisense respectively comprising SEQ ID NOs: 4578 and 4800), ds-siNA-197 (sense and antisense respectively comprising SEQ ID NOs: 4579 and 4801), ds-siNA-198 (sense and antisense respectively comprising SEQ ID NOs: 4580 and 4802), and ds-siNA-199 (sense and antisense respectively comprising SEQ ID NOs: 4581 and 4803). These siNA comprise a 5′-vinyl phosphonate and are derived from siRNAs that showed high potency in the live virus assay prior to the incorporation of the 5′-vinyl phosphonate. It was determined that the 5′-VP further improved potency for all constructs (see Examples). The most potent siNA were ds-siNA-196 and ds-siNA-199, which were selected for further modification.

[0221] In some embodiments, the siNA can be selected from, ds-siNA-217 (sense and antisense respectively comprising SEQ ID NOs: 4599 and 4821), ds-siNA-218 (sense and antisense respectively comprising SEQ ID NOs: 4600 and 4822), ds-siNA-219 (sense and antisense respectively comprising SEQ ID NOs: 4601 and 4823), ds-siNA-220 (sense and antisense respectively comprising SEQ ID NOs: 4602 and 4824), ds-siNA-221 (sense and antisense respectively comprising SEQ ID NOs: 4603 and 4825), and ds-siNA-222 (sense and antisense respectively comprising SEQ ID NOs: 4604 and 4826). These siNA are further modified forms of ds-siNA-196 and ds-siNA-199, which have different 2′-fluoro contents (three variants for each one of the parent siRNAs). All of these siNA also showed high potency across screening assays (see Examples).

[0222] Additionally, analogs of the specific embodiments (ds-siNA-001 to ds-siNA-224) can be prepared by altering or adjusting the modified nucleotides, phosphorylation blockers, 5′-stabilized end caps, and/or linkers as disclosed herein. For example, ds-siNA-223 is an analog of ds-siNA-196 in which an additional ps and mUmU overhang have been incorporated in place of dTdT. Similarly, ds-siNA-224 is an analog of ds-siNA-199 in which an additional ps and mUmU overhang have been incorporated in place of dTdT. Those skilled in the art will understand that other analogs can be similarly constructed.

[0223] Any of the foregoing specific embodiments can be incorporated into a pharmaceutical compositions, either alone or in combination with 1, 2, 3, 4, 5, 6, 7, 8, 9, or 10 or more additional siNA disclosed herein. Any of the foregoing specific embodiments can be used to treat or prevent viral infections, such as coronavirus infections (e.g., COVID-19) pursuant to the methods and uses disclosed herein.

### Pharmaceutical Compositions

[0224] The present disclosure also encompasses pharmaceutical compositions comprising siNAs of the present disclosure. One embodiment is a pharmaceutical composition comprising one or more siNA of the present disclosure, and a pharmaceutically acceptable diluent or carrier.

[0225] In some embodiments, the pharmaceutical compositions comprising any of the siNA molecules, sense strands, antisense strands, first nucleotide sequences, or second nucleotide sequences described herein. The compositions may comprise 1, 2, 3, 4, 5, 6, 7, 8, 9, 10, 11, 12 or more siNA molecules described herein. The compositions may comprise a first nucleotide sequence (i.e., a sense strand) comprising a nucleotide sequence of any one SEQ ID NOs: 1-1203, 2411-3392, 4383-4604, 4827, and 4828. In some embodiments, the composition comprises a second nucleotide sequence (i.e., antisense strand) comprising a nucleotide sequence of any one of SEQ ID NOs: 1204-2406, 3393-4374, 4605-4826, 4829, and 4830. In some embodiments, the composition comprises a sense strand comprising a nucleotide sequence of any one of SEQ ID NOs: 1-1203, 2411-3392, 4383-4604, 4827, and 4828. In some embodiments, the composition comprises an antisense strand comprising a nucleotide sequence of any one of SEQ ID NOs: 1204-2406, 3393-4374, 4605-4826, 4829, and 4830.

[0226] Alternatively or additionally, the pharmaceutical compositions may comprise (a) a phosphorylation blocker; and (b) a siNA. In some embodiments, the phosphorylation blocker is any of the phosphorylation blockers disclosed herein. In some embodiments, the siNA is any of the siNAs disclosed herein. In some embodiments, the siNA comprises any of the sense strands, antisense strands, first nucleotide sequences, or second nucleotide sequences described herein.

[0227] In some embodiments, the siNA comprises any of the sense strands, antisense strands, first nucleotide sequences, or second nucleotide sequences described herein. In some embodiments, the siNA comprises one or more modified nucleotides. In some embodiments, the one or more modified nucleotides are independently selected from a 2′-fluoro nucleotide and a 2′-O-methyl nucleotide. In some embodiments, the 2′-fluoro nucleotide or the 2′-O-methyl nucleotide is independently selected from any of the 2′-fluoro or 2′-O-methyl nucleotide mimics disclosed herein. In some embodiments, the siNA comprises a nucleotide sequence comprising any of the modification patterns disclosed herein. In some embodiments, the composition comprises (a) a conjugated moiety; and (b) a short interfering nucleic acid (siNA). In some embodiments, the siNA is any of the siNAs disclosed herein. In some embodiments, the siNA comprises any of the sense strands, antisense strands, first nucleotide sequences, or second nucleotide sequences described herein.

[0228] In some embodiments, the siNA comprises any of the sense strands, antisense strands, first nucleotide sequences, or second nucleotide sequences described herein. In some embodiments, the siNA comprises one or more modified nucleotides. In some embodiments, the one or more modified nucleotides are independently selected from a 2′-fluoro nucleotide and a 2′-O-methyl nucleotide. In some embodiments, the 2′-fluoro nucleotide or the 2′-O-methyl nucleotide is independently selected from any of the 2′-fluoro or 2′-O-methyl nucleotide mimics disclosed herein. In some embodiments, the siNA comprises a nucleotide sequence comprising any of the modification patterns disclosed herein.

[0229] In some embodiments, the pharmaceutical composition comprises (a) a 5′-stabilized end cap; and (b) a siNA. In some embodiments, the 5′-stabilized end cap is any of the 5-stabilized end caps disclosed herein. In some embodiments, the siNA is any of the siNAs disclosed herein. In some embodiments, the siNA comprises any of the sense strands, antisense strands, first nucleotide sequences, or second nucleotide sequences described herein. In some embodiments, the siNA comprises one or more modified nucleotides. In some embodiments, the one or more modified nucleotides are independently selected from a 2′-fluoro nucleotide and a 2′-O-methyl nucleotide. In some embodiments, the 2′-fluoro nucleotide or the 2′-O-methyl nucleotide is independently selected from any of the 2′-fluoro or 2′-O-methyl nucleotide mimics disclosed herein. In some embodiments, the siNA comprises a nucleotide sequence comprising any of the modification patterns disclosed herein.

[0230] In some embodiments, the pharmaceutical composition comprises (a) at least one phosphorylation blocker, conjugated moiety, or 5′-stabilized end cap; and (b) a short interfering nucleic acid (siNA). In some embodiments, the phosphorylation blocker is any of the phosphorylation blockers disclosed herein. In some embodiments, the 5′-stabilized end cap is any of the 5-stabilized end caps disclosed herein. In some embodiments, the siNA is any of the siNAs disclosed herein. In some embodiments, the siNA comprises any of the sense strands, antisense strands, first nucleotide sequences, or second nucleotide sequences described herein. In some embodiments, the siNA comprises one or more modified nucleotides. In some embodiments, the one or more modified nucleotides are independently selected from a 2′-fluoro nucleotide and a 2′-O-methyl nucleotide. In some embodiments, the 2′-fluoro nucleotide or the 2′-O-methyl nucleotide is independently selected from any of the 2′-fluoro or 2′-O-methyl nucleotide mimics disclosed herein. In some embodiments, the siNA comprises a nucleotide sequence comprising any of the modification patterns disclosed herein.

[0231] In some embodiments, the pharmaceutical composition containing the siNA of the present disclosure is formulated for systemic administration via parenteral delivery. Parenteral administration includes intravenous, intra-arterial, subcutaneous, intraperitoneal or intramuscular injection or infusion; also subdermal administration, e.g., via an implanted device. In a preferred embodiment, the pharmaceutical composition containing the siNA of the present disclosure is formulated for subcutaneous (SC) or intravenous (IV) delivery. Formulations for parenteral administration may include sterile aqueous solutions, which may also contain buffers, diluents and other pharmaceutically acceptable additives as understood by the skilled artisan. For intravenous use, the total concentration of solutes may be controlled to render the preparation isotonic.

[0232] The pharmaceutical compositions containing the siNA of the present disclosure are useful for treating a disease or disorder, e.g., associated with the expression or activity of a coronavirus gene, more specifically a non-structural protein, such as nsp8, nsp9, nsp10, nsp11, nsp12, nsp13, nsp14, or nsp15.

[0233] In some embodiments, the pharmaceutical composition comprises a siNA of the present disclosure that is complementary or hybridizes to a viral target RNA sequence (e.g., a non-structural protein of coronavirus), and a pharmaceutically acceptable diluent or carrier. When the pharmaceutical composition comprises two or more siNAs, the siNAs may be present in varying amounts. For example, in some embodiments, the weight ratio of first siNA to second siNA is 1:4 to 4:1, e.g., 1:4, 1:3, 1:2, 1:1, 2:1, 3:1, or 4:1. In some embodiments, the molar ratio of first siNA to second siNA is 1:4 to 4:1, e.g., 1:4, 1:3, 1:2, 1:1, 2:1, 3:1, or 4:1.

[0234] In some embodiments, the pharmaceutical composition comprises an amount of one or more of the siNA molecules described herein formulated with one or more pharmaceutically acceptable carriers (additives) and/or diluents. The pharmaceutical compositions may be specially formulated for administration in solid or liquid form, including those adapted for the following: (1) parenteral administration, for example, by subcutaneous, intramuscular, intravenous or epidural injection as, for example, a sterile solution or suspension, or sustained-release formulation; (2) topical application, for example, as a cream, ointment, or a controlled-release patch or spray applied to the skin; (3) intravaginally or intrarectally, for example, as a pessary, cream or foam; (4) sublingually; (5) ocularly; (6) transdermally; or (7) nasally.

[0235] Wetting agents, emulsifiers and lubricants, such as sodium lauryl sulfate and magnesium stearate, as well as coloring agents, release agents, coating agents, sweetening, flavoring and perfuming agents, preservatives and antioxidants can also be present in the compositions.

[0236] Examples of pharmaceutically-acceptable antioxidants include: (1) water soluble antioxidants, such as ascorbic acid, cysteine hydrochloride, sodium bisulfate, sodium metabisulfite, sodium sulfite and the like; (2) oil-soluble antioxidants, such as ascorbyl palmitate, butylated hydroxyanisole (BHA), butylated hydroxytoluene (BHT), lecithin, propyl gallate, alpha-tocopherol, and the like; and (3) metal chelating agents, such as citric acid, ethylenediamine tetraacetic acid (EDTA), sorbitol, tartaric acid, phosphoric acid, and the like.

[0237] Formulations of the present disclosure include those suitable for nasal, topical (including buccal and sublingual), rectal, vaginal and/or parenteral administration. The formulations may conveniently be presented in unit dosage form and may be prepared by any methods well known in the art of pharmacy. The amount of active ingredient which can be combined with a carrier material to produce a single dosage form will vary depending upon the host being treated, the particular mode of administration. The amount of active ingredient which can be combined with a carrier material to produce a single dosage form will generally be that amount of the compound (e.g., siNA molecule) which produces a therapeutic effect. Generally, out of one hundred percent, this amount will range from about 0.1 percent to about ninety-nine percent of active ingredient, preferably from about 5 percent to about 70 percent, most preferably from about 10 percent to about 30 percent.

[0238] In some embodiments, a formulation of the present disclosure comprises an excipient selected from the group consisting of cyclodextrins, celluloses, liposomes, micelle forming agents, e.g., bile acids, and polymeric carriers, e.g., polyesters and polyanhydrides; and a compound (e.g., siNA molecule) of the present disclosure.

[0239] Methods of preparing these formulations or compositions include the step of bringing into association a compound (e.g., siNA molecule) of the present disclosure with the carrier and, optionally, one or more accessory ingredients. In general, the formulations are prepared by uniformly and intimately bringing into association a compound (e.g., siNA molecule) of the present disclosure with liquid carriers, or finely divided solid carriers, or both, and then, if necessary, shaping the product.

[0240] Formulations of the disclosure suitable for a suspension in an aqueous or non-aqueous liquid, or as an oil-in-water or water-in-oil liquid emulsion, or as an elixir or syrup, each containing a predetermined amount of a compound (e.g., siNA molecule) of the present disclosure as an active ingredient. A compound (e.g., siNA molecule) of the present disclosure may also be administered as a bolus, electuary, or paste.

[0241] In dosage forms of the disclosure, the active ingredient may be mixed with one or more pharmaceutically-acceptable carriers, such as sodium citrate or dicalcium phosphate, and/or any of the following: (1) fillers or extenders, such as starches, lactose, sucrose, glucose, mannitol, and/or silicic acid; (2) binders, such as, for example, carboxymethylcellulose, alginates, gelatin, polyvinyl pyrrolidone, sucrose and/or acacia; (3) humectants, such as glycerol; (4) disintegrating agents, such as agar-agar, calcium carbonate, potato or tapioca starch, alginic acid, certain silicates, and sodium carbonate; (5) solution retarding agents, such as paraffin; (6) absorption accelerators, such as quaternary ammonium compounds and surfactants, such as poloxamer and sodium lauryl sulfate; (7) wetting agents, such as, for example, cetyl alcohol, glycerol monostearate, and non-ionic surfactants; (8) absorbents, such as kaolin and bentonite clay; (9) lubricants, such as talc, calcium stearate, magnesium stearate, solid polyethylene glycols, sodium lauryl sulfate, zinc stearate, sodium stearate, stearic acid, and mixtures thereof; (10) coloring agents; and (11) controlled release agents such as crospovidone or ethyl cellulose.

[0242] The disclosed dosage forms may be sterilized by, for example, filtration through a bacteria-retaining filter, or by incorporating sterilizing agents in the form of sterile solid compositions which can be dissolved in sterile water, or some other sterile injectable medium immediately before use. These compositions may also optionally contain opacifying agents and may be of a composition that they release the active ingredient(s) only, or preferentially, in a certain portion of the gastrointestinal tract, optionally, in a delayed manner. Examples of embedding compositions which can be used include polymeric substances and waxes. The active ingredient can also be in micro-encapsulated form, if appropriate, with one or more of the above-described excipients.

[0243] Liquid dosage forms of the compounds (e.g., siNA molecules) of the disclosure include pharmaceutically acceptable emulsions, microemulsions, solutions, suspensions, syrups and elixirs. In addition to the active ingredient, the liquid dosage forms may contain inert diluents commonly used in the art, such as, for example, water or other solvents, solubilizing agents and emulsifiers, such as ethyl alcohol, isopropyl alcohol, ethyl carbonate, ethyl acetate, benzyl alcohol, benzyl benzoate, propylene glycol, 1,3-butylene glycol, oils (I particular, cottonseed, groundnut, corn, germ, olive, castor and sesame oils), glycerol, tetrahydrofuryl alcohol, polyethylene glycols and fatty acid esters of sorbitan, and mixtures thereof.

[0244] Besides inert diluents, the compositions can also include adjuvants such as wetting agents, emulsifying and suspending agents, sweetening, flavoring, coloring, perfuming and preservative agents.

[0245] Suspensions, in addition to the active compounds (e.g., siNA molecules), may contain suspending agents as, for example, ethoxylated isostearyl alcohols, polyoxyethylene sorbitol and sorbitan esters, microcrystalline cellulose, aluminum metahydroxide, bentonite, agar-agar and tragacanth, and mixtures thereof.

[0246] Formulations of the pharmaceutical compositions of the disclosure for rectal or vaginal administration may be presented as a suppository, which may be prepared by mixing one or more compounds (e.g., siNA molecules) of the disclosure with one or more suitable nonirritating excipients or carriers comprising, for example, cocoa butter, polyethylene glycol, a suppository wax or a salicylate, and which is solid at room temperature, but liquid at body temperature and, therefore, will melt in the rectum or vaginal cavity and release the active compound (e.g., siNA molecule).

[0247] Formulations of the present disclosure which are suitable for vaginal administration also include pessaries, tampons, creams, gels, pastes, foams or spray formulations containing such carriers as are known in the art to be appropriate.

[0248] Dosage forms for the topical or transdermal administration of a compound (e.g., siNA molecule) of this disclosure include powders, sprays, ointments, pastes, creams, lotions, gels, solutions, patches and inhalants. The active compound (e.g., siNA molecule) may be mixed under sterile conditions with a pharmaceutically acceptable carrier, and with any preservatives, buffers, or propellants which may be required.

[0249] The ointments, pastes, creams and gels may contain, in addition to an active compound (e.g., siNA molecule) of this disclosure, excipients, such as animal and vegetable fats, oils, waxes, paraffins, starch, tragacanth, cellulose derivatives, polyethylene glycols, silicones, bentonites, silicic acid, talc and zinc oxide, or mixtures thereof.

[0250] Powders and sprays can contain, in addition to a compound (e.g., siNA molecule) of this disclosure, excipients such as lactose, talc, silicic acid, aluminum hydroxide, calcium silicates and polyamide powder, or mixtures of these substances. Sprays can additionally contain customary propellants, such as chlorofluorohydrocarbons and volatile unsubstituted hydrocarbons, such as butane and propane.

[0251] Transdermal patches have the added advantage of providing controlled delivery of a compound (e.g., siNA molecule) of the present disclosure to the body. Such dosage forms can be made by dissolving or dispersing the compound (e.g., siNA molecule) in the proper medium. Absorption enhancers can also be used to increase the flux of the compound (e.g., siNA molecule) across the skin. The rate of such flux can be controlled by either providing a rate controlling membrane or dispersing the compound (e.g., siNA molecule) in a polymer matrix or gel.

[0252] Ophthalmic formulations, eye ointments, powders, solutions and the like, are also contemplated as being within the scope of this invention.

[0253] Pharmaceutical compositions of this disclosure suitable for parenteral administration comprise one or more compounds (e.g., siNA molecules) of the disclosure in combination with one or more pharmaceutically-acceptable sterile isotonic aqueous or nonaqueous solutions, dispersions, suspensions or emulsions, or sterile powders which may be reconstituted into sterile injectable solutions or dispersions just prior to use, which may contain sugars, alcohols, antioxidants, buffers, bacteriostats, solutes which render the formulation isotonic with the blood of the intended recipient or suspending or thickening agents.

[0254] Examples of suitable aqueous and nonaqueous carriers which may be employed in the pharmaceutical compositions of the disclosure include water, ethanol, polyols (such as glycerol, propylene glycol, polyethylene glycol, and the like), and suitable mixtures thereof, vegetable oils, such as olive oil, and injectable organic esters, such as ethyl oleate. Proper fluidity can be maintained, for example, by the use of coating materials, such as lecithin, by the maintenance of the required particle size in the case of dispersions, and by the use of surfactants.

[0255] These compositions may also contain adjuvants such as preservatives, wetting agents, emulsifying agents and dispersing agents. Prevention of the action of microorganisms upon the subject compounds may be ensured by the inclusion of various antibacterial and antifungal agents, for example, paraben, chlorobutanol, phenol sorbic acid, and the like. It may also be desirable to include isotonic agents, such as sugars, sodium chloride, and the like into the compositions. In addition, prolonged absorption of the injectable pharmaceutical form may be brought about by the inclusion of agents which delay absorption such as aluminum monostearate and gelatin.

[0256] In some cases, in order to prolong the effect of a drug, it is desirable to slow the absorption of the drug from subcutaneous or intramuscular injection. This may be accomplished by the use of a liquid suspension of crystalline or amorphous material having poor water solubility. The rate of absorption of the drug then depends upon its rate of dissolution which, in turn, may depend upon crystal size and crystalline form. Alternatively, delayed absorption of a parenterally-administered drug form is accomplished by dissolving or suspending the drug in an oil vehicle.

[0257] Injectable depot forms are made by forming microencapsule matrices of the subject compounds (e.g., siNA molecules) in biodegradable polymers such as polylactide-polyglycolide. Depending on the ratio of drug to polymer, and the nature of the particular polymer employed, the rate of drug release can be controlled. Examples of other biodegradable polymers include poly(orthoesters) and poly(anhydrides). Depot injectable formulations are also prepared by entrapping the drug in liposomes or microemulsions which are compatible with body tissue.

[0258] When the compounds (e.g., siNA molecules) of the present disclosure are administered as pharmaceuticals, to humans and animals, they can be given per se or as a pharmaceutical composition containing, for example, 0.1 to 99% (more preferably, 10 to 30%) of active ingredient in combination with a pharmaceutically acceptable carrier.

### Methods of Treatment and Administration

[0259] The siNA molecules of the present disclosure may be used to treat or prevent a disease in a subject in need thereof. In some embodiments, a method of treating or preventing a disease in a subject in need thereof comprises administering to the subject any of the siNA molecules disclosed herein. In some embodiments, a method of treating or preventing a disease in a subject in need thereof comprises administering to the subject any of the compositions disclosed herein.

[0260] In some embodiments of the disclosed methods and uses, the disease is a respiratory disease. In some embodiments, the respiratory disease is a viral infection. In some embodiments, the respiratory disease is viral pneumonia. In some embodiments, the respiratory disease is an acute respiratory infection. In some embodiments, the respiratory disease is a cold. In some embodiments, the respiratory disease is severe acute respiratory syndrome (SARS). In some embodiments, the respiratory disease is Middle East respiratory syndrome (MERS). In some embodiments, the disease is coronavirus disease 2019 (e.g., COVID-19). In some embodiments, the respiratory disease can include one or more symptoms selected from coughing, sore throat, runny nose, sneezing, headache, fever, shortness of breath, myalgia, abdominal pain, fatigue, difficulty breathing, persistent chest pain or pressure, difficulty waking, loss of smell and taste, muscle or joint pain, chills, nausea or vomiting, nasal congestion, diarrhea, haemoptysis, conjunctival congestion, sputum production, chest tightness, and palpitations. In some embodiments, the respiratory disease can include complications selected from sinusitis, otitis media, pneumonia, acute respiratory distress syndrome, disseminated intravascular coagulation, pericarditis, and kidney failure. In some embodiments, the respiratory disease is idiopathic.

[0261] In some embodiments, the subject is a mammal. In some embodiments, the subject is a human. In some embodiments, the subject is a non-human primate. In some embodiments, the subject is a cat. In some embodiments, the subject is a camel. In preferred embodiments in which the subject is a human, the subject may be at least 40 years old, at least 45 years old, at least 50 years old, at least 55 years old, at least 60 years old, at least 65 years old, at least 70 years old, at least 75 years old, or at least 80 years old or older. In some embodiments, the subject is a pediatric subject (i.e., less than 18 years old).

[0262] The preparations (e.g., siNA molecules or pharmaceutical compositions thereof) of the present disclosure may be given parenterally, topically, or rectally or administered in the form of an inhalant. They are, of course, given in forms suitable for each administration route. For example, they are administered in tablets or capsule form, administration by injection, infusion, or inhalation; topical by lotion or ointment; rectal by suppositories. Injection, infusion, or inhalation are preferred.

[0263] These compounds may be administered to humans and other animals for therapy or as a prophylactic by any suitable route of administration, including nasally (as by, for example, a spray), rectally, intravaginally, parenterally, intracisternally and topically, as by powders, ointments or drops, including buccally and sublingually. In some embodiments, the compounds or compositions are inhaled, as by, for example, an inhaler, a nebulizer, or in an aerosolized form.

[0264] Regardless of the route of administration selected, the compounds (e.g., siNA molecules) of the present disclosure, which may be used in a suitable hydrated form, and/or the pharmaceutical compositions of the present disclosure, are formulated into pharmaceutically-acceptable dosage forms by conventional methods known to those of skill in the art.

[0265] In some embodiments, the present disclosure provides methods of treating or preventing a coronavirus infection, comprising administering to a subject in need thereof a therapeutically effective amount of one or more of the siNAs or a pharmaceutical composition as disclosed herein. In some embodiments, the coronavirus infection is selected from the group consisting of Middle East Respiratory Syndrome (MERS), Severe Acute Respiratory Syndrome (SARS), and COVID-19. In some embodiments, the subject has been treated with one or more additional coronavirus treatment agents. In some embodiments, the subject is concurrently treated with one or more additional coronavirus treatment agents.

[0266] Actual dosage levels of the active ingredients (e.g., siNA molecules) in the pharmaceutical compositions of this disclosure may be varied so as to obtain an amount of the active ingredient which is effective to achieve the desired therapeutic response for a particular patient, composition, and mode of administration, without being toxic to the patient.

[0267] The selected dosage level will depend upon a variety of factors including the activity of the particular compound (e.g., siNA molecule) of the present disclosure employed, or the ester, salt or amide thereof, the route of administration, the time of administration, the rate of excretion or metabolism of the particular compound being employed, the rate and extent of absorption, the duration of the treatment, other drugs, compounds and/or materials used in combination with the particular compound employed, the age, sex, weight, condition, general health and prior medical history of the patient being treated, and like factors well known in the medical arts.

[0268] A physician or veterinarian having ordinary skill in the art can readily determine and prescribe the effective amount of the pharmaceutical composition required. For example, the physician or veterinarian could start doses of the compounds (e.g., siNA molecules) of the disclosure employed in the pharmaceutical composition at levels lower than that required in order to achieve the desired therapeutic effect and gradually increase the dosage until the desired effect is achieved.

[0269] In general, a suitable daily dose of a compound (e.g., siNA molecule) of the disclosure is the amount of the compound that is the lowest dose effective to produce a therapeutic effect. Such an effective dose generally depends upon the factors described above. Preferably, the compounds are administered at about 0.01 mg/kg to about 200 mg/kg, more preferably at about 0.1 mg/kg to about 100 mg/kg, even more preferably at about 0.5 mg/kg to about 50 mg/kg. In some embodiments, the compound is administered at a dose equal to or greater than 0.01, 0.02, 0.03, 0.04, 0.05, 0.06, 0.07, 0.08, 0.09, 0.10, 0.11, 0.12, 0.13, 0.14, 0.15, 0.16, 0.17, 0.18, 0.19, 0.20, 0.21, 0.22, 0.23, 0.24, 0.25, 0.26, 0.27, 0.28, 0.29, 0.30, 0.35, 0.40, 0.45, 0.50, 0.55, 0.60, 0.65, 0.7, 0.75, 0.8, 0.85, 0.9, 0.95, or 1 mg/kg. In some embodiments, the compound is administered at a dose equal to or less than 200, 190, 180, 170, 160, 150, 140, 130, 120, 110, 100, 95, 90, 85, 80, 75, 70, 65, 60, 55, 50, 45, 40, 35, 30, 25, 20, or 15 mg/kg. In some embodiments, the total daily dose of the compound is equal to or greater than 10, 15, 20, 25, 30, 35, 40, 45, 50, 55, 60, 65, 70, 75, 80, 85, 90, 95, 100, 105, 110, 115, 120, 125, 130, 135, 140, 145, 150, 155, 160, 165, 170, 175, 180, 185, 190, 195, or 100 mg.

[0270] If desired, the effective daily dose of the active compound (e.g., siNA) may be administered as two, three, four, five, six, seven, eight, nine, ten or more doses or sub-doses administered separately at appropriate intervals throughout the day, optionally, in unit dosage forms. In some embodiments, the compound is administered at least 1, 2, 3, 4, 5, 6, 7, 8, 9, 10, 11, 12, 13, 14, or 15 times. Preferred dosing is one administration per day. In some embodiments, the compound is administered at least 1, 2, 3, 4, 5, 6, 7, 8, 9, 10, 11, 12, 13, 14, 15, 16, 17, 18, 19, 20, or 21 times a week. In some embodiments, the compound is administered at least 1, 2, 3, 4, 5, 6, 7, 8, 9, 10, 11, 12, 13, 14, 15, 16, 17, 18, 19, 20, or 21 times a month. In some embodiments, the compound is administered once every 1, 2, 3, 4, 5, 6, 7, 8, 9, 10, 11, 12, 13, 14, 15, 16, 17, 18, 19, 20, or 21 days. In some embodiments, the compound is administered every 3 days. In some embodiments, the compound is administered once every 1, 2, 3, 4, 5, 6, 7, 8, 9, 10, 11, 12, 13, 14, or 15 weeks. In some embodiments, the compound is administered every month. In some embodiments, the compound is administered once every 1, 2, 3, 4, 5, 6, 7, 8, 9, 10, 11, 12, 13, 14, or 15 months. In some embodiments, the compound is administered at least 1, 2, 3, 4, 5, 6, 7, 8, 9, 10, 11, 12, 13, 14, 15, 16, 17, 18, 19, 20, 21, 22, 23, 24, 25, 26, 27, 28, 29, 30, 31, 32, 33, 34, 35, 36, 37, 38, 39, 40, 41, 42, 43, 44, 45, 46, 47, 48, 49, 50, 51, 52, or 53 times over a period of at least 1, 2, 3, 4, 5, 6, 7, 8, 9, 10, 11, 12, 13, 14, 15, 16, 17, 18, 19, 20, 21, 22, 23, 24, 25, 26, 27, 28, 29, 30, 31, 32, 33, 34, 35, 36, 37, 38, 39, 40, 41, 42, 43, 44, 45, 46, 47, 48, 49, 50, 51, 52, 53, 54, 55, 56, 57, 58, 59, 60, 61, 62, 63, 64, 65, 66, 67, 68, 69, or 70 days. In some embodiments, the compound is administered at least 1, 2, 3, 4, 5, 6, 7, 8, 9, 10, 11, 12, 13, 14, 15, 16, 17, 18, 19, 20, 21, 22, 23, 24, 25, 26, 27, 28, 29, 30, 31, 32, 33, 34, 35, 36, 37, 38, 39, 40, 41, 42, 43, 44, 45, 46, 47, 48, 49, 50, 51, 52, or 53 times over a period of at least 1, 2, 3, 4, 5, 6, 7, 8, 9, 10, 11, 12, 13, 14, 15, 16, 17, 18, 19, 20, 21, 22, 23, 24, 25, 26, 27, 28, 29, 30, 31, 32, 33, 34, 35, 36, 37, 38, 39, 40, 41, 42, 43, 44, 45, 46, 47, 48, 49, 50, 51, 52, or 53 weeks. In some embodiments, the compound is administered at least 1, 2, 3, 4, 5, 6, 7, 8, 9, 10, 11, 12, 13, 14, 15, 16, 17, 18, 19, 20, 21, 22, 23, 24, 25, 26, 27, 28, 29, 30, 31, 32, 33, 34, 35, 36, 37, 38, 39, 40, 41, 42, 43, 44, 45, 46, 47, 48, 49, 50, 51, 52, or 53 times over a period of at least 1, 2, 3, 4, 5, 6, 7, 8, 9, 10, 11, 12, 13, 14, 15, 16, 17, 18, 19, 20, 21, 22, 23, 24, 25, 26, 27, 28, 29, 30, 31, 32, 33, 34, 35, 36, 37, 38, 39, 40, 41, 42, 43, 44, 45, 46, 47, 48, 49, 50, 51, 52, or 53 months. In some embodiments, the compound is administered at least once a week for a period of at least 1, 2, 3, 4, 5, 6, 7, 8, 9, 10, 11, 12, 13, 14, 15, 16, 17, 18, 19, 20, 21, 22, 23, 24, 25, 26, 27, 28, 29, 30, 31, 32, 33, 34, 35, 36, 37, 38, 39, 40, 41, 42, 43, 44, 45, 46, 47, 48, 49, 50, 51, 52, 53, 54, 55, 56, 57, 58, 59, 60, 61, 62, 63, 64, 65, 66, 67, 68, 69, or 70 weeks. In some embodiments, the compound is administered at least once a week for a period of at least 1, 2, 3, 4, 5, 6, 7, 8, 9, 10, 11, 12, 13, 14, 15, 16, 17, 18, 19, 20, 21, 22, 23, 24, 25, 26, 27, 28, 29, 30, 31, 32, 33, 34, 35, 36, 37, 38, 39, 40, 41, 42, 43, 44, 45, 46, 47, 48, 49, 50, 51, 52, 53, 54, 55, 56, 57, 58, 59, 60, 61, 62, 63, 64, 65, 66, 67, 68, 69, or 70 months. In some embodiments, the compound is administered at least twice a week fora period of at least 1, 2, 3, 4, 5, 6, 7, 8, 9, 10, 11, 12, 13, 14, 15, 16, 17, 18, 19, 20, 21, 22, 23, 24, 25, 26, 27, 28, 29, 30, 31, 32, 33, 34, 35, 36, 37, 38, 39, 40, 41, 42, 43, 44, 45, 46, 47, 48, 49, 50, 51, 52, 53, 54, 55, 56, 57, 58, 59, 60, 61, 62, 63, 64, 65, 66, 67, 68, 69, or 70 weeks. In some embodiments, the compound is administered at least twice a week for a period of at least 1, 2, 3, 4, 5, 6, 7, 8, 9, 10, 11, 12, 13, 14, 15, 16, 17, 18, 19, 20, 21, 22, 23, 24, 25, 26, 27, 28, 29, 30, 31, 32, 33, 34, 35, 36, 37, 38, 39, 40, 41, 42, 43, 44, 45, 46, 47, 48, 49, 50, 51, 52, 53, 54, 55, 56, 57, 58, 59, 60, 61, 62, 63, 64, 65, 66, 67, 68, 69, or 70 months. In some embodiments, the compound is administered at least once every two weeks for a period of at least 2, 3, 4, 5, 6, 7, 8, 9, 10, 11, 12, 13, 14, 15, 16, 17, 18, 19, 20, 21, 22, 23, 24, 25, 26, 27, 28, 29, 30, 31, 32, 33, 34, 35, 36, 37, 38, 39, 40, 41, 42, 43, 44, 45, 46, 47, 48, 49, 50, 51, 52, 53, 54, 55, 56, 57, 58, 59, 60, 61, 62, 63, 64, 65, 66, 67, 68, 69, or 70 weeks. In some embodiments, the compound is administered at least once every two weeks for a period of at least 2, 3, 4, 5, 6, 7, 8, 9, 10, 11, 12, 13, 14, 15, 16, 17, 18, 19, 20, 21, 22, 23, 24, 25, 26, 27, 28, 29, 30, 31, 32, 33, 34, 35, 36, 37, 38, 39, 40, 41, 42, 43, 44, 45, 46, 47, 48, 49, 50, 51, 52, 53, 54, 55, 56, 57, 58, 59, 60, 61, 62, 63, 64, 65, 66, 67, 68, 69, or 70 months. In some embodiments, the compound is administered at least once every four weeks fora period of at least 4, 5, 6, 7, 8, 9, 10, 11, 12, 13, 14, 15, 16, 17, 18, 19, 20, 21, 22, 23, 24, 25, 26, 27, 28, 29, 30, 31, 32, 33, 34, 35, 36, 37, 38, 39, 40, 41, 42, 43, 44, 45, 46, 47, 48, 49, 50, 51, 52, 53, 54, 55, 56, 57, 58, 59, 60, 61, 62, 63, 64, 65, 66, 67, 68, 69, or 70 weeks. In some embodiments, the compound is administered at least once every four weeks for a period of at least 4, 5, 6, 7, 8, 9, 10, 11, 12, 13, 14, 15, 16, 17, 18, 19, 20, 21, 22, 23, 24, 25, 26, 27, 28, 29, 30, 31, 32, 33, 34, 35, 36, 37, 38, 39, 40, 41, 42, 43, 44, 45, 46, 47, 48, 49, 50, 51, 52, 53, 54, 55, 56, 57, 58, 59, 60, 61, 62, 63, 64, 65, 66, 67, 68, 69, or 70 months.

[0271] In some embodiments, any one of the siNAs or compositions disclosed herein is administered in a particle or viral vector. In some embodiments, the viral vector is a vector of adenovirus, adeno-associated virus (AAV), alphavirus, flavivirus, herpes simplex virus, lentivirus, measles virus, picornavirus, poxvirus, retrovirus, or rhabdovirus. In some embodiments, the viral vector is a recombinant viral vector. In some embodiments, the viral vector is selected from AAVrh.74, AAVrh.10, AAVrh.20, AAV-1, AAV-2, AAV-3, AAV-4, AAV-5, AAV-6, AAV-7, AAV-8, AAV-9, AAV-10, AAV-11, AAV-12 and AAV-13.

[0272] The subject of the described methods may be a mammal, and it includes humans and non-human mammals. In some embodiments, the subject is a human, such as an adult human.

[0273] The disclosed siNA can be administered alone or in combination with one or more additional coronavirus treatment agents and/or antiviral agents. The additional coronavirus treatment agent and/or antiviral may be a small molecule (e.g., a nucleoside analog or a protease inhibitor) or a biologic (e.g., an antibody or peptide). Examples of suitable coronavirus treatment agents include, but are not limited to, remdesivir, favipiravir, molnupiravir, dexamethasone, bamlanivimab, casirivimab, imdevimab, convalescent plasma, and interferons. Examples of suitable antiviral agents include, but are not limited to, baloxavir marboxil, oseltamivir, anamivir, vidarabine, acyclovir, ganciclovir, zidovudine, didanosine, zalcitabine, lamivudine, saquinavir, ritonavir, indinavir, nelfinavir, ribavirin, amantadine, rimantadine, remdesivir, favipiravir, and molnupiravir.

[0274] When the compounds (e.g., siNA molecules) described herein are co-administered with another, the effective amount may be less than when the compound is used alone.

### Examples

### Example 1: siNA Synthesis

[0275] This example describes an exemplary method for synthesizing ds-siNAs, such as the siNAs disclosed in Table 6 (as identified by the ds-siNA ID).

[0276] The 2′-OMe phosphoramidite 5′-O-DMT-deoxy Adenosine (NH-Bz), 3′-O-(2-cyanoethyl-N,N-diisopropyl phosphoramidite, 5′-O-DMT-deoxy Guanosine (NH-ibu), 3′-O-(2-cyanoethyl-N,N-diisopropyl phosphoramidite, 5′-O-DMT-deoxy Cytosine (NH-Bz), 3′-O-(2-cyanoethyl-N,N-diisopropyl phosphoramidite, 5′-O-DMT-Uridine 3′-O-(2-cyanoethyl-N,N-diisopropyl phosphoramidite and solid supports were purchased from Chemgenes Corp. MA.

[chemical structure]

[0277] The 2′-F-5′-O-DMT-(NH-Bz) Adenosine-3′-O-(2-cyanoethyl-N,N-diisopropyl phosphoramidite, 2′-F-5′-O-DMT-(NH-ibu)-Guanosine, 3′-O-(2-cyanoethyl-N,N-diisopropyl phosphoramidite, 5′-O-DMT-(NH-Bz)-Cytosine, 2′-F-3′-O-(2-cyanoethyl-N,N-diisopropyl phosphoramidite, 5′-O-DMT-Uridine, 2′-F-3′-O-(2-cyanoethyl-N,N-diisopropyl phosphoramidite and solid supports were purchased from Thermo Fischer Milwaukee Wis., USA.

[chemical structure]

[0278] All the monomers were dried in vacuum desiccator with desiccants (P₂O₅, RT 24 h). The solid supports (CPG) attached to the nucleosides and universal supports was obtained from LGC and Chemgenes. The chemicals and solvents for post synthesis workflow were purchased from commercially available sources like VWR/Sigma and used without any purification or treatment. Solvent (Acetonitrile) and solutions (amidite and activator) were stored over molecular sieves during synthesis.

[0279] The oligonucleotides were synthesized on a DNA/RNA Synthesizers (Expedite 8909 or ABI-394) using standard oligonucleotide phosphoramidite chemistry starting from the 3′ residue of the oligonucleotide preloaded on CPG support. An extended coupling of 0.1M solution of phosphoramidite in CH₃CN in the presence of 5-(ethylthio)-1H-tetrazole activator to a solid bound oligonucleotide followed by standard capping, oxidation and deprotection afforded modified oligonucleotides. The 0.1M 12, THF:Pyridine; Water-7:2:1 was used as oxidizing agent while DDTT ((dimethylamino-methylidene) amino)-3H-1,2,4-dithiazaoline-3-thione was used as the sulfur-transfer agent for the synthesis of oligoribonucleotide phosphorothioates. The stepwise coupling efficiency of all modified phosphoramidites was more than 98%.

| Reagents | Detailed Description |
|---|---|
| Deblock Solution | 3% Dichloroacetic acid (DCA) in |
| | Dichloromethane (DCM) |
| Amidite Concentration | 0.1M in Anhydrous Acetonitrile |
| Activator | 0.25M Ethyl-thio-Tetrazole (ETT) |
| Cap-A solution | Acetic anhydride in Pyridine/THF |
| Cap-B Solution | 16% 1-Methylimidazole in THF |
| Oxidizing Solution | 0.02M I₂, THF:Pyridine; Water-7:2:1 |
| Sulfurizing Solution | 0.2M DDTT in Pyridine/Acetonitrile 1:1 |

[0280] Cleavage and Deprotection

[0281] Deprotection and cleavage from the solid support was achieved with mixture of ammonia methylamine (1:1, AMA) for 15 min at 65° C., when the universal linker was used, the deprotection was left for 90 min at 65° C. or solid supports were heated with aqueous ammonia (28%) solution at 55° C. for 16 h to deprotect the base labile protecting groups.

[0282] Quantitation of Crude SiNA or Raw Analysis

[0283] Samples were dissolved in deionized water (1.0 mL) and quantitated as follows: Blanking was first performed with water alone (2 ul) on Nanodrop then Oligo sample reading obtained at 260 nm. The crude material is dried down and stored at −20° C.

[0284] Crude HPLC/LC-MS analysis

[0285] The 0.1 OD of the crude samples were analyzed for crude HPLC and LC-MS analysis. After Confirming the crude LC-MS data then purification step was performed.

[0286] HPLC Purification

[0287] The unconjugated oligonucleotides were purified by anion-exchange HPLC. The buffers were 20 mM sodium phosphate in 10% CH₃CN, pH 8.5 (buffer A) and 20 mM sodium phosphate in 10% CH₃CN, 1.0 M NaBr, pH 8.5 (buffer B). Fractions containing full-length oligonucleotides were pooled.

[0288] Desalting of Purified SiNA

[0289] The purified dry siNA was then desalted using Sephadex G-25 M (Amersham Biosciences). The cartridge was conditioned with 10 mL of deionized water thrice. Finally, the purified siNA dissolved thoroughly in 2.5 mL RNAse free water was applied to the cartridge with very slow drop wise elution. The salt free siNA was eluted with 3.5 ml deionized water directly into a screw cap vial.

[0290] IEX HPLC and Electrospray LC/MS Analysis

[0291] Approximately 0.10 OD of siNA is dissolved in water and then pipetted in special vials for IEX-HPLC and LC/MS analysis. Analytical HPLC and ES LC-MS established the integrity of the compounds.

[0292] Duplex Preparation

[0293] Single strand oligonucleotides (Sense and Antisense strands) were annealed (1:1 by molar equivalents, heat 90° C. for 3 min followed by room temperature, 20 min) to give the duplex ds-siNA. The final compounds were analyzed on size exclusion chromatography (SEC).

### Example 2: Synthesis of 5′ End Cap Monomer

[chemical structure]

[chemical structure]

### Example 2 Monomer Synthesis Scheme

[0295] Preparation of (2): To a solution of 1 (15 g, 57.90 mmol) in DMF (150 mL) were added AcSK (11.24 g, 98.43 mmol) and TBAI (1.07 g, 2.89 mmol), and the mixture was stirred at 25° C. for 12 h. Upon completion as monitored by LCMS, the mixture was diluted with H₂O (10 mL) and extracted with EA (200 mL*3). The combined organic layers were washed with brine (200 mL*3), dried over anhydrous Na₂SO₄, filtered and concentrated under reduced pressure to give 2 (14.5 g, 96.52% yield, 98% purity) as a colorless oil. ESI-LCMS: 254.28 [M+H]⁺; ¹H NMR (400 MHz, CDCl₃) δ=4.78-4.65 (m, 2H), 3.19 (d, J=14.1 Hz, 2H), 2.38 (s, 3H), 1.32 (t, J=6.7 Hz, 12H); ³¹P NMR (162 MHz, CDCl₃) δ=20.59.

[0296] Preparation of (3): To a solution of 2 (14.5 g, 57.02 mmol) in CH₃CN (50 mL) and MeOH (25 mL) was added NaOH (3 M, 28.51 mL), and the mixture was stirred at 25° C. for 12 h under Ar. Upon completion as monitored by TLC, the reaction mixture was concentrated under reduced pressure to remove CH₃CN and CH₃OH. The residue was diluted with water (50 mL) and adjust pH=7 by 6M HCl, and the mixture was extracted with EA (50 mL*3). The combined organic layers were washed with brine (50 mL*3), dried over anhydrous Na₂SO₄, filtered and concentrated under reduced pressure to give 3 (12.1 g, crude) as a colorless oil.

[0297] Preparation of (4): To a solution of 3 (12.1 g, 57.01 mmol) in CH₃CN (25 mL) and MeOH (25 mL) was added A (14.77 g, 57.01 mmol) dropwise at 25° C., and the mixture was stirred at 25° C. under Ar for 12 h. Upon completion as monitored by LCMS, the reaction mixture was concentrated under reduced pressure to give 4 (19.5 g, 78.85% yield) as a colorless oil. ¹H NMR (400 MHz, CDCl₃) δ=4.80-4.66 (m, 4H), 2.93 (d, J=11.3 Hz, 4H), 1.31 (dd, J=3.9, 6.1 Hz, 24H); ³¹P NMR (162 MHz, CDCl₃) δ=22.18.

[0298] Preparation of (5): To a solution of 4 (19.5 g, 49.95 mmol) in MeOH (100 mL) and H₂O (100 mL) was added Oxone (61.41 g, 99.89 mmol) at 25° C. in portions, and the mixture was stirred at 25° C. for 12 h under Ar. Upon completion as monitored by LCMS, the reaction mixture was filtered, and the filtrate was concentrated under reduced pressure to remove MeOH. The residue was extracted with EA (50 mL*3). The combined organic layers were washed with brine (50 mL*3), dried over anhydrous Na₂SO₄, filtered and concentrated under reduced pressure to give a residue. The crude product was triturated with i-Pr₂O and n-Hexane (1:2, 100 mL) at 25° C. for 30 min to give 5 (15.6 g, 73.94% yield,) as a white solid. ¹H NMR (400 MHz, CDCl₃) δ=4.92-4.76 (m, 4H), 4.09 (d, J=16.1 Hz, 4H), 1.37 (dd, J=3.5, 6.3 Hz, 24H); ³¹P NMR (162 MHz, CDCl₃) δ=10.17.

[0299] Preparation of (7): To a mixture of 5 (6.84 g, 16.20 mmol) in THF (20 mL) was added LiBr (937.67 mg, 10.80 mmol) until dissolved, followed by DIEA (1.40 g, 10.80 mmol, 1.88 mL) under argon at 15° C. The mixture was stirred at 15° C. for 15 min. 6 (4 g, 10.80 mmol) were added. The mixture was stirred at 15° C. for 3 h. Upon completion as monitored by LCMS, the reaction mixture was quenched by addition of H₂O (40 mL) and extracted with EA (40 mL*3). The combined organic layers were washed with brine (100 mL), dried over Na₂SO₄, filtered and concentrated under reduced pressure to give a residue. The residue was purified by flash reverse-phase chromatography (120 g C-18 Column, Eluent of 0˜60% ACN/H₂O gradient @ 80 mL/min) to give 7 (5.7 g, 61.95% yield) as a colorless oil. ESI-LCMS: 611.2 [M+H]⁺, ¹H NMR (400 MHz, CDCl₃); δ=9.26 (s, 1H), 7.50 (d, J=8.1 Hz, 1H), 7.01 (s, 2H), 5.95 (d, J=2.7 Hz, 1H), 5.80 (dd, J=2.1, 8.2 Hz, 1H), 4.89-4.72 (m, 2H), 4.66 (d, J=7.2 Hz, 1H), 4.09-4.04 (m, 1H), 3.77 (dd, J=2.7, 4.9 Hz, 1H), 3.62 (d, J=3.1 Hz, 1H), 3.58 (d, J=3.1 Hz, 1H), 3.52 (s, 3H), 1.36 (td, J=1.7, 6.1 Hz, 12H), 0.92 (s, 9H), 0.12 (s, 6H); ³¹P NMR (162 MHz, CDCl₃) δ=9.02

[0300] Preparation of (8): To a mixture of 7 (5.4 g, 8.84 mmol) in THF (80 mL) was added Pd/C (5.4 g, 10% purity) under N₂. The suspension was degassed under vacuum and purged with H₂ several times. The mixture was stirred under H₂ (15 psi) at 20° C. for 1 hr. Upon completion as monitored by LCMS, the reaction mixture was filtered, and the filtrate was concentrated to give 8 (5.12 g, 94.5% yield) as a white solid. ESI-LCMS: 613.3 [M+H]⁺; H NMR (400 MHz, CD₃CN) δ=9.31 (s, 1H), 7.37 (d, J=8.0 Hz, 1H), 5.80-5.69 (m, 2H), 4.87-4.75 (m, 2H), 4.11-4.00 (m, 1H), 3.93-3.85 (m, 1H), 3.80-3.74 (m, 1H), 3.66-3.60 (m, 1H), 3.57-3.52 (m, 1H), 3.49 (s, 3H), 3.46-3.38 (m, 1H), 2.35-2.24 (m, 1H), 2.16-2.03 (m, 1H), 1.89-1.80 (m, 1H), 1.37-1.34 (m, 12H), 0.90 (s, 9H), 0.09 (s, 6H); ³¹P NMR (162 MHz, CD₃CN) δ=9.41.

[0301] Preparation of (9): To a solution of 8 (4.4 g, 7.18 mmol) in THF (7.2 mL) was added TBAF (1 M, 7.18 mL), and the mixture was stirred at 20° C. for 1 hr. Upon completion as monitored by LCMS, the reaction mixture was diluted with H₂O (50 mL) and extracted with EA (50 mL*4). The combined organic layers were washed with brine (50 mL), dried over Na₂SO₄, filtered and concentrated under reduced pressure to give a residue. The residue was purified by flash silica gel chromatography (ISCO®; 40 g SepaFlash® Silica Flash Column, Eluent of 0˜5%, MeOH/DCM gradient @ 40 mL/min) to give 9 (3.2 g, 88.50% yield) as a white solid. ESI-LCMS: 499.2 [M+H]⁺¹; ¹H NMR (400 MHz, CD₃CN) δ=9.21 (s, 1H), 7.36 (d, J=8.3 Hz, 1H), 5.81-5.72 (m, 2H), 4.88-4.74 (m, 2H), 3.99-3.87 (m, 2H), 3.84 (dd, 5.4 Hz, 1H), 3.66-3.47 (m, 7H), 2.98 (s, 1H), 2.44-2.15 (m, 2H), 1.36 (d, J=6.0 Hz, 12H); ³¹P NMR (162 MHz, CD₃CN) δ=9.48.

[0302] Preparation of (Example 2 monomer): To a mixture of 9 (3.4 g, 6.82 mmol, 1 eq) and 4 A MS (3.4 g) in MeCN (50 mL) was added P1 (2.67 g, 8.87 mmol, 2.82 mL, 1.3 eq) at 0° C., followed by addition of 1H-imidazole-4,5-dicarbonitrile (886.05 mg, 7.50 mmol) at 0° C. The mixture was stirred at 20° C. for 2 h. Upon completion as monitored by LCMS, the reaction mixture was quenched by addition of saturated aq. NaHCO₃ (50 mL) and diluted with DCM (100 mL). The organic layer was washed with saturated aq. NaHCO₃ (50 mL*2), dried over Na₂SO₄, filtered and concentrated under reduced pressure to give a residue. The residue was purified by prep-HPLC: column: YMC-Triart Prep C18 250*50 mm*10 um; mobile phase: [water (10 mM NH₄HCO₃)-ACN]; B %: 15% to give a impure product. The impure product was further purified by a flash silica gel column (0% to 5% i-PrOH in DCM with 0.5% TEA) to give Example 2 monomer (2.1 g, 43.18% yield) as a white solid. ESI-LCMS: 721.2 [M+Na]⁺; H NMR (400 MHz, CD₃CN) δ=9.29 (s, 1H), 7.45 (d, J=8.1 Hz, 1H), 5.81 (d, J=4.2 Hz, 1H), 5.65 (d, J=8.1 Hz, 1H), 4.79-4.67 (m, 2H), 4.26-4.05 (m, 2H), 4.00-3.94 (m, 1H), 3.89-3.63 (m, 6H), 3.53-3.33 (m, 5H), 2.77-2.61 (m, 2H), 2.31-2.21 (m, 1H), 2.16-2.07 (m, 1H), 1.33-1.28 (m, 12H), 1.22-1.16 (m, 1H), 1.22-1.16 (m, 11H); ³¹P NMR (162 MHz, CD₃CN) δ=149.89, 149.78, 10.07, 10.02.

### Example 3: Synthesis of 5′ End Cap Monomer

[chemical structure]

[chemical structure]

### Example 3 Monomer Synthesis Scheme

[0304] Preparation of (2): To a solution of 1 (5 g, 13.42 mmol) in DMF (50 mL) were added PPh₃ (4.58 g, 17.45 mmol) and 2-hydroxyisoindoline-1,3-dione (2.85 g, 17.45 mmol), followed by a solution of DIAD (4.07 g, 20.13 mmol, 3.91 mL) in DMF (10 mL) dropwise at 15° C. The resulting solution was stirred at 15° C. for 18 hr. The reaction mixture was then diluted with DCM (50 mL), washed with H₂O (60 mL*3) and brine (30 mL), dried over Na₂SO₄, filtered and evaporated to give a residue. The residue was then triturated with EtOH (55 mL) for 30 min, and the collected white powder was washed with EtOH (10 mL*2) and dried to give 2 (12.2 g, 85.16% yield) as a white powder (the reaction was set up in two batches and combined) ESI-LCMS: 518.1 [M+H]⁺.

[0305] Preparation of (3): 2 (6 g, 11.59 mmol) was suspended in MeOH (50 mL), and then NH₂NH₂.H₂O (3.48 g, 34.74 mmol, 3.38 mL, 50% purity) was added dropwise at 20° C. The reaction mixture was stirred at 20° C. for 4 hr. Upon completion, the reaction mixture was diluted with EA (20 mL) and washed with NaHCO₃ (10 mL*2) and brine (10 mL). The combined organic layers were then dried over Na₂SO₄, filtered and evaporated to give 3 (8.3 g, 92.5% yield) as a white powder. (The reaction was set up in two batches and combined). ESI-LCMS: 388.0 [M+H]⁺, ¹H NMR (400 MHz, DMSO-d₆) δ=11.39 (br s, 1H), 7.72 (d, J=8.1 Hz, 1H), 6.24-6.09 (m, 2H), 5.80 (d, J=4.9 Hz, 1H), 5.67 (d, J=8.1 Hz, 1H), 4.26 (t, J=4.9 Hz, 1H), 4.03-3.89 (m, 1H), 3.87-3.66 (m, 3H), 3.33 (s, 3H), 0.88 (s, 9H), 0.09 (d, J=1.3 Hz, 6H)

[0306] Preparation of (4): To a solution of 3 (7 g, 18.06 mmol) and Py (1.43 g, 18.06 mmol, 1.46 mL) in DCM (130 mL) was added a solution of MSCl (2.48 g, 21.68 mmol, 1.68 mL) in DCM (50 mL) dropwise at −78° C. under N₂. The reaction mixture was allowed to warm to 15° C. in 30 min and stirred at 15° C. for 3 h. The reaction mixture was quenched by addition of ice-water (70 mL) at 0° C., and then extracted with DCM (50 mL*3). The combined organic layers were washed with saturated aq. NaHCO₃ (50 mL) and brine (30 mL), dried over Na₂SO₄, filtered and concentrated under reduced pressure to give a residue. The residue was purified by flash silica gel chromatography (ISCO®; 30 g SepaFlash® Silica Flash Column, Eluent of 0˜20% i-PrOH/DCM gradient @ 30 mL/min to give 4 (6.9 g, 77.94% yield) as a white solid. ESI-LCMS: 466.1 [M+H]⁺, ¹H NMR (400 MHz, DMSO-d₆) δ=11.41 (br s, 1H), 10.15 (s, 1H), 7.69 (d, J=8.1 Hz, 1H), 5.80 (d, J=4.4 Hz, 1H), 5.65 (d, J=8.1 Hz, 1H), 4.24 (t, J=5.2 Hz, 1H), 4.16-3.98 (m, 3H), 3.87 (t, J=4.8 Hz, 1H), 3.00 (s, 3H), 2.07 (s, 3H), 0.88 (s, 9H), 0.10 (d, J=1.5 Hz, 6H)

[0307] Preparation of (5): To a solution of 4 (6.9 g, 14.82 mmol) in THF (70 mL) was added TBAF (1 M, 16.30 mL) at 15° C. The reaction mixture was stirred at 15° C. for 18 hr, and then evaporated to give a residue. The residue was purified by flash silica gel chromatography (ISCO®; 24 g SepaFlash® Silica Flash Column, Eluent of 0˜9% MeOH/Ethyl acetate gradient @ 30 mL/min) to give 5 (1.8 g, 50.8% yield) as a white solid. ESI-LCMS: 352.0 [M+H]⁺; ¹H NMR (400 MHz, DMSO-d₆) δ=11.40 (s, 1H), 10.13 (s, 1H), 7.66 (d, J=8.1 Hz, 1H), 5.83 (d, J=4.9 Hz, 1H), 5.65 (dd, J=1.8, 8.1 Hz, 1H), 5.36 (d, J=6.2 Hz, 1H), 4.13-4.00 (m, 4H), 3.82 (t, J=5.1 Hz, 1H), 3.36 (s, 3H), 3.00 (s, 3H)

[0308] Preparation of (Example 3 monomer): To a mixture of 5 (3 g, 8.54 mmol) and DIEA (2.21 g, 17.08 mmol, 2.97 mL) in ACN (90 mL) was added P2 (3.03 g, 12.81 mmol) dropwise at 15° C. The reaction mixture was stirred at 15° C. for 5 h. Upon completion, the reaction mixture was diluted with EA (40 mL) and quenched with 5% NaHCO₃ (20 mL). The organic layer was washed with brine (30 mL), dried over Na₂SO₄, filtered and evaporated to give a residue. The residue was purified by flash silica gel chromatography (ISCO®; 12 g SepaFlash® Silica Flash Column, Eluent of 0˜15% i-PrOH/(DCM with 2% TEA) gradient @ 20 mL/min) to Example 3 monomer (2.1 g, 43.93% yield) as a white solid. ESI-LCMS: 552.3 [M+H]⁺; ¹H NMR (400 MHz, CD₃CN) δ=8.78 (br s, 1H), 7.57 (dd, J=4.6, 8.2 Hz, 1H), 5.97-5.80 (m, 1H), 5.67 (d, J=8.3 Hz, 1H), 4.46-4.11 (m, 4H), 3.95-3.58 (m, 5H), 3.44 (d, J=16.3 Hz, 3H), 3.02 (d, J=7.5 Hz, 3H), 2.73-2.59 (m, 2H), 1.23-1.15 (m, 12H); ³¹P NMR (162 MHz, CD₃CN) δ=150.30, 150.10

### Example 4: Synthesis of 5′ End Cap Monomer

[chemical structure]

### Example 4 Monomer Synthesis Scheme

[0310] Preparation of (2): To the solution of 1 (5 g, 12.90 mmol) and TEA (1.57 g, 15.48 mmol, 2.16 mL) in DCM (50 mL) was added P-4 (2.24 g, 15.48 mmol, 1.67 mL) in DCM (10 mL) dropwise at 15° C. under N₂. The reaction mixture was stirred at 15° C. for 3 h. Upon completion as monitored by LCMS and TLC (PE:EtOAc=0:1), the reaction mixture was concentrated to dryness, diluted with H₂O (20 mL), and extracted with EA (50 mL*3). The combined organic layers were washed with brine (30 mL*3), dried over anhydrous Na₂SO₄, filtered, and the filtrate was concentrated under reduced pressure to give a residue. The residue was purified by flash silica gel chromatography (ISCO®; 40 g SepaFlash® Silica Flash Column, Eluent of 0˜95% Ethyl acetate/Petroleum ether gradient @ 60 mL/min) to give 2 (5.3 g, 71.3% yield) as a white solid. ESI-LCMS: 496.1 [M+H]⁺; H NMR (400 MHz, CDCl₃) δ=0.10 (d, J=4.02 Hz, 6H) 0.91 (s, 9H) 3.42-3.54 (m, 3H) 3.65-3.70 (m, 1H) 3.76-3.89 (m, 6H) 4.00 (dd, J=10.92, 2.89 Hz, 1H) 4.08-4.13 (m, 1H) 4.15-4.23 (m, 2H) 5.73 (dd, J=8.28, 2.01 Hz, 1H) 5.84 (d, J=2.76 Hz, 1H) 6.86 (d, J=15.81 Hz, 1H) 7.72 (d, J=8.03 Hz, 1H) 9.10 (s, 1H); ³¹P NMR (162 MHz, CD₃CN) δ=9.65

[0311] Preparation of (3): To a solution of 2 (8.3 g, 16.75 mmol) in THF (50 mL) were added TBAF (1 M, 16.75 mL) and CH₃COOH (1.01 g, 16.75 mmol, 957.95 uL). The mixture was stirred at 20° C. for 12 hr. Upon completion as monitored by LCMS, the reaction mixture was concentrated under reduced pressure. The residue was purified by column chromatography (SiO₂, PE: EA=0˜100%; MeOH/EA=0˜10%) to give 3 (5 g, 77.51% yield) as a white solid. ESI-LCMS: 382.1 [M+H]⁺; ¹H NMR (400 MHz, CDCl₃) δ=3.35 (s, 3H) 3.65 (br d, J=2.76 Hz, 3H) 3.68 (d, J=2.76 Hz, 3H) 3.77 (t, J=5.08 Hz, 1H) 3.84-4.10 (m, 4H) 5.33 (br d, J=5.52 Hz, 1H) 5.62 (d, J=7.77 Hz, 1H) 5.83 (d, J=4.94 Hz, 1H) 7.69 (d, J=7.71 Hz, 1H) 9.08 (d, J=16.81 Hz, 1H) 11.39 (br s, 1H); ³¹P NMR (162 MHz, CD₃CN) δ=15.41

[0312] Preparation of (Example 4 monomer): To a solution of 3 (2 g, 5.25 mmol) and DIPEA (2.03 g, 15.74 mmol, 2.74 mL, 3 eq) in MeCN (21 mL) and pyridine (7 mL) was added P2 (1.86 g, 7.87 mmol) dropwise at 20° C., and the mixture was stirred at 20° C. for 3 hr. Upon completion as monitored by LCMS, the reaction mixture was diluted with water (20 mL) and extracted with EA (50 mL). The combined organic layers were washed with brine (30 mL), dried over anhydrous Na₂SO₄, filtered, and the filtrate was concentrated under reduced pressure to give a residue. The residue was purified by flash silica gel chromatography (ISCO®; 25 g SepaFlash® Silica Flash Column, Eluent of 0˜45% (Ethyl acetate:EtOH=4:1)/Petroleum ether gradient) to give Example 4 monomer (1.2 g, 38.2% yield) as a white solid. ESI-LCMS: 604.1 [M+H]⁺; ¹H NMR (400 MHz, CD₃CN) δ=1.12-1.24 (m, 12H) 2.61-2.77 (m, 2H) 3.43 (d, J=17.64 Hz, 3H) 3.59-3.69 (m, 2H) 3.71-3.78 (m, 6H) 3.79-4.14 (m, 5H) 4.16-4.28 (m, 1H) 4.29-4.42 (m, 1H) 5.59-5.72 (m, 1H) 5.89 (t, J=4.53 Hz, 1H) 7.48 (br d, J=12.76 Hz, 1H) 7.62-7.74 (m, 1H) 9.26 (br s, 1H); ³¹P NMR (162 MHz, CD₃CN) δ=150.57, 149.96, 9.87

### Example 5: Synthesis of 5′ End Cap Monomer

[chemical structure]

[chemical structure]

### Example 5 Monomer Synthesis Scheme

[0314] Preparation of (2): To a solution of 1 (30 g, 101.07 mmol, 87% purity) in CH₃CN (1.2 L) and Py (60 mL) were added 12 (33.35 g, 131.40 mmol, 26.47 mL) and PPh₃ (37.11 g, 141.50 mmol) in one portion at 10° C. The reaction was stirred at 25° C. for 48 h. Upon completion, the mixture was diluted with saturated aq.Na₂S₂O₃ (300 mL) and saturated aq.NaHCO₃ (300 mL), concentrated to remove CH₃CN, and extracted with EtOAc (300 mL*3). The combined organic layers were washed with brine (300 mL), dried over Na₂SO₄, filtered and concentrated under reduced pressure to give a residue. The residue was purified by flash silica gel chromatography (ISCO®; 330 g SepaFlash® Silica Flash Column, Eluent of 0˜60% Methanol/Dichloromethane gradient @ 100 mL/min) to give 2 (28.2 g, 72% yield) as a brown solid. ESI-LCMS: 369.1 [M+H]⁺; H NMR (400 MHz, DMSO-d₆) δ=11.43 (s, 1H), 7.68 (d, J=8.1 Hz, 1H), 5.86 (d, J=5.5 Hz, 1H), 5.69 (d, J=8.1 Hz, 1H), 5.46 (d, J=6.0 Hz, 1H), 4.08-3.96 (m, 2H), 3.90-3.81 (m, 1H), 3.60-3.51 (m, 1H), 3.40 (dd, J=6.9, 10.6 Hz, 1H), 3.34 (s, 3H).

[0315] Preparation of (3): To the solution of 2 (12 g, 32.6 mmol) in DCM (150 mL) were added AgNO₃ (11.07 g, 65.20 mmol), 2,4,6-trimethylpyridine (11.85 g, 97.79 mmol, 12.92 mL), and DMTCl (22.09 g, 65.20 mmol) at 10° C., and the reaction mixture was stirred at 10° C. for 16 hr. Upon completion, the mixture was filtered and the filtrate was concentrated under reduced pressure. The residue was purified by flash silica gel chromatography (ISCO®; 120 g SepaFlash® Silica Flash Column, Eluent of 0˜50% Ethyl acetate/Petroleum ether gradient @ 60 mL/min) to give 3 (17 g, 70.78% yield) as a yellow solid. ESI-LCMS: 693.1 [M+Na]⁺¹; H NMR (400 MHz, DMSO-d₆) δ=11.46 (s, 1H), 7.60 (d, J=8.4 Hz, 1H), 7.49 (d, J=7.2 Hz, 2H), 7.40-7.30 (m, 6H), 7.29-7.23 (m, 1H), 6.93 (d, J=8.8 Hz, 4H), 5.97 (d, J=6.0 Hz, 1H), 5.69 (d, J=8.0 Hz, 1H), 4.05-4.02 (m, 1H), 3.75 (d, J=1.2 Hz, 6H), 3.57 (t, J=5.6 Hz, 1H), 3.27 (s, 4H), 3.06 (t, J=10.4 Hz, 1H), 2.98-2.89 (m, 1H).

[0316] Preparation of (4): To a solution of 3 (17 g, 25.35 mmol) in DMF (200 mL) was added AcSK (11.58 g, 101.42 mmol) at 25° C., and the reaction was stirred at 60° C. for 2 hr. The mixture was diluted with H₂O (600 mL) and extracted with EtOAc (300 mL*4). The combined organic layers were washed with brine (300 mL), dried over Na₂SO₄, filtered, and concentrated under reduced pressure to give 4 (15.6 g, crude) as a brown solid, which was used directly without further purification. ESI-LCMS: 641.3 [M+H]⁺.

[0317] Preparation of (5): To a solution of 4 (15.6 g, 25.21 mmol) in CH₃CN (200 mL) were added DTT (11.67 g, 75.64 mmol, 11.22 mL) and LiOH.H₂O (1.06 g, 25.21 mmol) at 10° C. under Ar. The reaction was stirred at 10° C. for 1 hr. The mixture was concentrated under reduced pressure to remove CH₃CN, and the residue was diluted with H₂O (400 mL) and extracted with EtOAc (200 mL*3). The combined organic layers were washed with brine (300 mL), dried over Na₂SO₄, filtered and concentrated under reduced pressure to give a residue. The residue was purified by flash silica gel chromatography (ISCO®; 220 g SepaFlash® Silica Flash Column, Eluent of 0˜60% Ethyl acetate/Petroleum ether gradient @ 100 mL/min) to give 5 (8.6 g, 56.78% yield) as a white solid. ESI-LCMS: 599.3 [M+Na]⁺; ¹H NMR (400 MHz, DMSO-d₆) δ=8.79 (s, 1H), 7.61 (d, J=8.0 Hz, 1H), 7.56-7.46 (m, 2H), 7.45-7.37 (m, 4H), 7.36-7.27 (m, 3H), 6.85 (dd, J=2.8, 8.8 Hz, 4H), 5.85 (d, J=1.3 Hz, 1H), 5.68 (dd, J=2.0, 8.2 Hz, 1H), 4.33-4.29 (m, 1H), 3.91 (dd, J=4.8, 8.2 Hz, 1H), 3.81 (d, J=1.6 Hz, 6H), 3.33 (s, 3H), 2.85-2.80 (m, 1H), 2.67-2.55 (m, 2H), 1.11 (t, J=8.8 Hz, 1H).

[0318] Preparation of (Example 5 monomer): To a solution of 5 (6 g, 10.40 mmol) in DCM (120 mL) were added P1 (4.08 g, 13.53 mmol, 4.30 mL) and DCI (1.35 g, 11.45 mmol) in one portion at 10° C. under Ar. The reaction was stirred at 10° C. for 2 hr. The reaction mixture was diluted with saturated aq.NaHCO₃ (50 mL) and extracted with DCM (20 mL*3). The combined organic layers were washed with brine (30 mL), dried over Na₂SO₄, filtered and concentrated under reduced pressure to give a residue. The residue was purified by prep-HPLC (column: YMC-Triart Prep C18 250*50 mm*10 um; mobile phase: [water (10 mM NH₄HCO₃)-ACN]; B %: 35%-81%, 20 min) to give Example 5 monomer (3.54 g, 43.36% yield) as a yellow solid. ESI-LCMS: 776.4 [M+H]⁺; ¹H NMR (400 MHz, DMSO-d₆) δ=7.65-7.38 (m, 7H), 7.37-7.22 (m, 3H), 6.90 (d, J=8.4 Hz, 4H), 5.92 (s, 1H), 5.66 (t, J=8.2 Hz, 1H), 4.13 (d, J=4.0 Hz, 1H), 4.00-3.88 (m, 1H), 3.87-3.59 (m, 10H), 3.33 (d, J=5.8 Hz, 3H), 3.12-2.94 (m, 1H), 2.78-2.60 (m, 3H), 2.55-2.48 (m, 1H), 1.36-0.98 (m, 12H); ³¹P NMR (162 MHz, DMSO-d₆) δ=162.69.

### Example 6: Synthesis of 5′ End Cap Monomer

[chemical structure]

### Example 6 Monomer Synthesis Scheme

[0320] Preparation of (2): To a solution of 1 (22.6 g, 45.23 mmol) in DCM (500 mL) and H₂O (125 mL) were added TEMPO (6.40 g, 40.71 mmol) and DIB (29.14 g, 90.47 mmol) at 0° C. The mixture was stirred at 20° C. for 20 h. Upon completion as monitored by LCMS, saturated aq. NaHCO₃ was added to the mixture to adjust pH >8. The mixture was diluted with H₂O (200 mL) and washed with DCM (100 mL*3). The aqueous layer was collected, adjusted to pH<5 by HCl (4M), and extracted with DCM (200 mL*3). The combined organic layers were washed with brine (300 mL), dried over Na₂SO₄, filtered, and concentrated under reduced pressure to give 2 (17.5 g, 68.55% yield) as a yellow solid. ESI-LCMS: 514.2 [M+H]⁺; ¹H NMR (400 MHz, DMSO-d₆) δ=11.27 (s, 1H), 8.86 (s, 1H), 8.78 (s, 1H), 8.06 (d, J=7.5 Hz, 2H), 7.68-7.62 (m, 1H), 7.59-7.52 (m, 2H), 6.28 (d, J=6.8 Hz, 1H), 4.82-4.76 (m, 1H), 4.54 (dd, J=4.1, 6.7 Hz, 1H), 4.48 (d, J=1.8 Hz, 1H), 3.32 (s, 3H), 0.94 (s, 9H), 0.18 (d, J=4.8 Hz, 6H).

[0321] Preparation of (3): To a solution of 2 (9.3 g, 18.11 mmol) in MeOH (20 mL) was added SOCl₂ (3.23 g, 27.16 mmol, 1.97 mL) dropwise at 0° C. The mixture was stirred at 20° C. for 0.5 hr. Upon completion as monitored by LCMS, the reaction mixture was quenched by addition of saturated aq. NaHCO₃ (80 mL) and concentrated under reduced pressure to remove MeOH. The aqueous layer was extracted with DCM (80 mL*3). The combined organic layers were washed with brine (200 mL), dried over Na₂SO₄, filtered and concentrated under reduced pressure to give a residue. The residue was purified by flash silica gel chromatography (ISCO®; 120 g SepaFlash® Silica Flash Column, Eluent of 0˜5%, MeOH/DCM gradient @ 85 mL/min) to give 3 (5.8 g, 60% yield) as a yellow solid. ESI-LCMS: 528.3 [M+H]⁺, ¹H NMR (400 MHz, DMSO-d₆) δ=11.28 (s, 1H), 8.79 (d, J=7.3 Hz, 2H), 8.06 (d, J=7.5 Hz, 2H), 7.68-7.62 (m, 1H), 7.60-7.53 (m, 2H), 6.28 (d, J=6.6 Hz, 1H), 4.87 (dd, J=2.4, 4.0 Hz, 1H), 4.61 (dd, J=4.3, 6.5 Hz, 1H), 4.57 (d, J=2.2 Hz, 1H), 3.75 (s, 3H), 3.32 (s, 3H), 0.94 (s, 9H), 0.17 (d, J=2.2 Hz, 6H).

[0322] Preparation of (4): To a mixture of 3 (5.7 g, 10.80 mmol) in CD₃OD (120 mL) was added NaBD₄ (1.63 g, 43.21 mmol) in portions at 0° C., and the mixture was stirred at 20° C. for 1 hr. Upon completion as monitored by LCMS, the reaction mixture was neutralized by AcOH (˜10 mL) and concentrated under reduced pressure to give a residue. The residue was purified by flash silica gel chromatography (ISCO®; 40 g SepaFlash® Silica Flash Column, Eluent of 0˜5%, MeOH/DCM gradient @ 40 mL/min) to give 4 (4.15 g, 7.61 mmol, 70.45% yield) as a yellow solid. ESI-LCMS: 502.2 [M+H]⁺; ¹H NMR (400 MHz, DMSO-d₆) δ=11.23 (s, 1H), 8.76 (s, 2H), 8.04 (d, J=7.3 Hz, 2H), 7.69-7.62 (m, 1H), 7.60-7.52 (m, 2H), 6.14 (d, J=6.0 Hz, 1H), 5.18 (s, 1H), 4.60-4.51 (m, 2H), 3.98 (d, J=3.0 Hz, 1H), 3.32 (s, 3H), 0.92 (s, 9H), 0.13 (d, J=1.5 Hz, 6H).

[0323] Preparation of (5): To a solution of 4 (4.85 g, 9.67 mmol) in pyridine (50 mL) was added DMTrCl (5.90 g, 17.40 mmol) at 25° C. and the mixture was stirred for 2 hr. Upon completion as monitored by LCMS, the reaction mixture was concentrated under reduced pressure to remove pyridine. The residue was diluted with EtOAc (150 mL) and washed with H₂O (50 mL*3), dried over Na₂SO₄, filtered and concentrated under reduced pressure to give a residue. The residue was purified by flash silica gel chromatography (ISCO®; 80 g SepaFlash® Silica Flash Column, Eluent of 0˜70%, EA/PE gradient @ 60 mL/min) to give 5 (6.6 g, 84.06% yield) as a yellow solid. ESI-LCMS: 804.3[M+H]⁺, ¹H NMR (400 MHz, DMSO-d₆) δ=11.22 (s, 1H), 8.68 (d, J=11.0 Hz, 2H), 8.03 (d, J=7.3 Hz, 2H), 7.68-7.60 (m, 1H), 7.58-7.49 (m, 2H), 7.37-7.30 (m, 2H), 7.27-7.16 (m, 7H), 6.88-6.79 (m, 4H), 6.17 (d, J=4.2 Hz, 1H), 4.72 (t, J=5.0 Hz, 1H), 4.60 (t, J=4.5 Hz, 1H), 4.03-3.98 (m, 1H), 3.71 (s, 6H), 0.83 (s, 9H), 0.12-0.03 (m, 6H).

[0324] Preparation of (6): To a solution of 5 (6.6 g, 8.21 mmol) in THF (16 mL) was added TBAF (1 M, 8.21 mL,), and the mixture was stirred at 20° C. for 2 hr. Upon completion as monitored by LCMS, the reaction mixture was diluted with EA (150 mL) and washed with H₂O (50 mL*3). The organic layer was washed with brine (150 mL), dried over Na₂SO₄, filtered and concentrated under reduced pressure to give a residue. The residue was purified by flash silica gel chromatography (ISCO®; 80 g SepaFlash® Silica Flash Column, Eluent of 10-100%, EA/PE gradient @ 30 mL/min) to give 6 (5.4 g, 94.4% yield) as a yellow solid. ESI-LCMS: 690.3 [M+H]⁺; ¹H NMR (400 MHz, DMSO-d₆) δ=11.24 (s, 1H), 8.69 (s, 1H), 8.62 (s, 1H), 8.05 (d, J=7.3 Hz, 2H), 7.69-7.62 (m, 1H), 7.60-7.52 (m, 2H), 7.40-7.33 (m, 2H), 7.30-7.18 (m, 7H), 6.84 (dd, J=5.9, 8.9 Hz, 4H), 6.19 (d, J=4.8 Hz, 1H), 5.36 (d, J=6.0 Hz, 1H), 4.59-4.52 (m, 1H), 4.48 (q, J=5.1 Hz, 1H), 4.11 (d, J=4.8 Hz, 1H), 3.72 (d, J=1.0 Hz, 6H), 3.40 (s, 3H).

[0325] Preparation of (Example 6 monomer): To a solution of 6 (8.0 g, 11.60 mmol) in MeCN (150 mL) was added P-1 (4.54 g, 15.08 mmol, 4.79 mL) at 0° C., followed by DCI (1.51 g, 12.76 mmol) in one portion. The mixture was warmed to 20° C. and stirred for 2 h. Upon completion as monitored by LCMS, the reaction mixture was quenched by addition of saturated aq. NaHCO₃ (50 mL) and diluted with DCM (250 mL). The organic layer was washed with saturated aq.NaHCO₃ (50 mL*2), dried over Na₂SO₄, filtered and concentrated under reduced pressure. The residue was purified by a flash silica gel column (0% to 60% EA in PE contain 0.5% TEA) to give Example 6 monomer (5.75 g, 55.37% yield, 99.4% purity) as a white solid. ESI-LCMS: 890.4 [M+H]⁺; ¹H NMR (400 MHz, CD₃CN) δ=9.55 (s, 1H), 8.63-8.51 (m, 1H), 8.34-8.24 (m, 1H), 7.98 (br d, J=7.5 Hz, 2H), 7.65-7.55 (m, 1H), 7.53-7.46 (m, 2H), 7.44-7.37 (m, 2H), 7.32-7.17 (m, 7H), 6.84-6.77 (m, 4H), 6.14 (d, J=4.3 Hz, 1H), 4.84-4.73 (m, 1H), 4.72-4.65 (m, 1H), 4.34-4.27 (m, 1H), 3.91-3.61 (m, 9H), 3.50-3.43 (m, 3H), 2.72-2.61 (m, 1H), 2.50 (t, J=6.0 Hz, 1H), 1.21-1.15 (m, 10H), 1.09 (d, J=6.8 Hz, 2H); ³¹P NMR (162 MHz, CD₃CN) δ =150.01, 149.65

### Example 7: Synthesis of 5′ End Cap Monomer

[chemical structure]

[chemical structure]

### Example 7 Monomer Synthesis Scheme

[0327] Preparation of (2): To a solution of 1 (10 g, 27.22 mmol) in CH₃CN (200 mL) and H₂O (50 mL) were added TEMPO (3.85 g, 24.50 mmol) and DIB (17.54 g, 54.44 mmol). The mixture was stirred at 25° C. for 12 h. Upon completion as monitored by LCMS, the reaction mixture was concentrated under reduced pressure to give a residue. The residue was triturated with EtOAc (600 mL) for 30 min. The resulting suspension was filtered and the collected solid was washed with EtOAc (300 mL*2) to give 2 (20.09 g, 91.5% yield) as a white solid. ESI-LCMS: 382.0 [M+H]⁺.

[0328] Preparation of (3): To a solution of 2 (6 g, 15.73 mmol) in MeOH (100 mL) was added SOCl₂ (2.81 g, 23.60 mmol, 1.71 mL) dropwise at 0° C. The mixture was stirred at 25° C. for 12 h. Upon completion as monitored by LCMS, the reaction mixture was quenched by addition of NaHCO₃ (4 g) and stirred at 25° C. for 30 min. The reaction mixture was filtered and the filtrate was concentrated under reduced pressure to give 3 (18.8 g, 95.6% yield) as a white solid. The crude product was used for the next step without further purification. (The reaction was set up in parallel 3 batches and combined). ESI-LCMS: 396.1 [M+H]⁺; ¹H NMR (400 MHz, DMSO-d₆) δ=12.26-11.57 (m, 2H), 8.42-8.06 (m, 1H), 6.14-5.68 (m, 2H), 4.56 (s, 2H), 4.33 (dd, J=4.0, 7.3 Hz, 1H), 3.77 (m, 3H), 3.30 (s, 3H), 2.81-2.69 (m, 1H), 1.11 (s, 6H)

[0329] Preparation of (4 & 5): To a mixture of 3 (10.1 g, 25.55 mmol) in CD₃OD (120 mL) was added NaBD₄ (3.29 g, 86.86 mmol, 3.4 eq) in portions at 0° C. The mixture was stirred at 25° C. for 1 h. Upon completion as monitored by LCMS, the reaction mixture was neutralized with AcOH (˜15 mL) and concentrated under reduced pressure to give a residue. The residue was purified by flash silica gel chromatography (ISCO®; 120 g SepaFlash® Silica Flash Column, Eluent of 0˜7.4%, MeOH/DCM gradient @ 80 mL/min) to give 4 (2.98 g, 6.88 mmol, 27% yield) as a yellow solid. ESI-LCMS: 370.1[M+H]⁺ and 5 (10.9 g, crude) as a yellow solid. ESI-LCMS: 300.1[M+H]⁺; ¹H NMR (400 MHz, CD₃OD) δ=7.85 (s, 1H), 5.87 (d, J=6.0 Hz, 1H), 4.46-4.39 (m, 1H), 4.34 (t, J=5.4 Hz, 1H), 4.08 (d, J=3.1 Hz, 1H), 3.49-3.38 (m, 4H)

[0330] Preparation of 6: To a solution of 4 (1.9 g, 4.58 mmol, 85.7% purity) in pyridine (19 mL) was added DMTrCl (2.02 g, 5.96 mmol). The mixture was stirred at 25° C. for 2 h under N₂. Upon completion as monitored by LCMS, the reaction mixture was quenched by MeOH (10 mL) and concentrated under reduce pressure to give a residue. The residue was diluted with H₂O (10 mL*3) and extracted with EA (20 mL*3). The combined organic layers were washed with brine (20 mL), dried over anhydrous Na₂SO₄, filtered and concentrated under reduce pressure to give a residue. The residue was purified by flash silica gel chromatography (ISCO®; 25 g SepaFlash® Silica Flash Column, Eluent of 0˜77%, PE: (EA with 10% EtOH): 1% TEA@ 35 mL/min) to give 6 (2.6 g, 81.71% yield, 96.71% purity) as a white foam. ESI-LCMS: 672.2 [M+H]⁺; ¹H NMR (400 MHz, CDCl₃) δ=12.02 (s, 1H), 7.96 (s, 1H), 7.83 (s, 1H), 7.51 (d, J=7.4 Hz, 2H), 7.37 (d, J=8.6 Hz, 4H), 7.25-7.17 (m, 2H), 6.80 (t, J=8.4 Hz, 4H), 5.88 (d, J=6.3 Hz, 1H), 4.69 (t, J=5.7 Hz, 1H), 4.64 (s, 1H), 4.54 (s, 1H), 4.19 (d, J=2.9 Hz, 1H), 3.77 (d, J=4.5 Hz, 6H), 3.60-3.38 (m, 3H), 2.81 (s, 1H), 1.81 (td, J=6.9, 13.7 Hz, 1H), 0.97 (d, J=6.8 Hz, 3H), 0.80 (d, J=6.9 Hz, 3H)

[0331] Preparation of Example 7 monomer: To a solution of 6 (8.4 g, 12.5 mmol) in MeCN (80 mL) was added P-1 (4.9 g, 16.26 mmol, 5.16 mL) at 0° C., followed by addition of DCI (1.624 g, 13.76 mmol) in one portion at 0° C. under Ar. The mixture was stirred at 25° C. for 2 h. Upon completion as monitored by LCMS, the reaction mixture was quenched with saturated aq.NaHCO₃ (20 mL) and extracted with DCM (50 mL*2). The combined organic layers were dried over anhydrous Na₂SO₄, filtered and concentrated under reduce pressure to give a residue. The residue was purified by flash silica gel chromatography (ISCO®; 40 g SepaFlash® Silica Flash Column, Eluent of 0˜52% PE: EA (10% EtOH): 5% TEA, @ 80 mL/min) to give Example 7 monomer (3.4 g, 72.1% yield,) as a white foam. ESI-LCMS: 872.4 [M+H]⁺; ¹H NMR (400 MHz, CD₃CN) δ=12.46-11.07 (m, 1H), 9.29 (s, 1H), 7.84 (d, J=14.6 Hz, 1H), 7.42 (t, J=6.9 Hz, 2H), 7.34-7.17 (m, 7H), 6.85-6.77 (m, 4H), 5.95-5.77 (m, 1H), 4.56-4.40 (m, 2H), 4.24 (dd, J=4.0, 13.3 Hz, 1H), 3.72 (d, J=2.0 Hz, 7H), 3.66-3.53 (m, 3H), 3.42 (d, J=11.8 Hz, 3H), 2.69-2.61 (m, 1H), 2.60-2.42 (m, 2H), 1.16-1.00 (m, 18H); ³¹P NMR (162 MHz, CD₃CN) δ=149.975, 149.9

### Example 8: Synthesis of 5′ End Cap Monomer

[chemical structure]

[chemical structure]

### Example 8 Monomer Synthesis Scheme

[0333] Preparation of (2): To a solution of 1 (40 g, 58.16 mmol) in DMF (60 mL) were added imidazole (11.88 g, 174.48 mmol), NaI (13.08 g, 87.24 mmol), and TBSCl (17.52 g, 116.32 mmol) at 20° C. in one portion. The reaction mixture was stirred at 20° C. for 12 h. Upon completion, the mixture was diluted with EA (200 mL). The organic layer was washed with brine/water (80 mL/80 mL*4), dried over Na₂SO₄, filtered and evaporated to give 2 (50.8 g, crude) as yellow solid. ESI-LCMS: 802.3 [M+H]⁺

[0334] Preparation of (3): To a solution of 2 (8.4 g, 10.47 mmol) in DCM (120 mL) were added Et₃SiH (3.06 g, 26.3 mmol, 4.2 mL) and TFA (1.29 g, 0.84 mL) dropwise at 0° C. The reaction mixture was stirred at 20° C. for 2 h. The reaction mixture was washed with saturated aq.NaHCO₃ (15 mL) and brine (80 mL). The organic layer was dried over Na₂SO₄, filtered and evaporated. The residue was purified by flash silica gel chromatography (ISCO®; 80 g SepaFlash® Silica Flash Column, Eluent of 0˜83% EA/PE gradient @ 80 mL/min) to give 3 (2.92 g, 55.8% yield,) as a white solid. ESI-LCMS: 500.2 [M+H]⁺; ¹H NMR (400 MHz, CDCl₃) δ=8.79 (s, 1H), 8.14 (s, 1H), 8.02 (d, J=7.6 Hz, 2H), 7.64-7.58 (m, 1H), 7.56-7.49 (m, 2H), 5.98-5.93 (m, 1H), 4.63-4.56 (m, 2H), 4.23 (s, 1H), 3.98 (dd, J=1.5, 13.1 Hz, 1H), 3.75 (dd, J=1.5, 13.1 Hz, 1H), 3.28 (s, 3H), 2.06-1.99 (m, 1H), 1.00-0.90 (m, 9H), 0.15 (d, J=7.0 Hz, 6H).

[0335] Preparation of (4): 3 (6 g, 12.01 mmol) and tert-butyl N-methylsulfonylcarbamate (3.52 g, 18.01 mmol) were co-evaporated with toluene (50 mL), dissolved in dry THF (100 mL), and cooled to 0° C. PPh₃ (9.45 g, 36.03 mmol,) was then added, followed by dropwise addition of DIAD (7.28 g, 36.03 mmol, 7.00 mL) in dry THF (30 mL). The reaction mixture was stirred at 20° C. for 18 h. Upon completion, the reaction mixture was then diluted with DCM (100 mL) and washed with water (70 mL) and brine (70 mL), dried over Na₂SO₄, filtered and evaporated to give a residue. The residue was purified by flash silica gel chromatography (ISCO®; 80 g SepaFlash® Silica Flash Column, Eluent of 0˜100% Ethyl acetate/Petroleum ether gradient @ 60 mL/min) followed by reverse-phase HPLC (0.1% NH₃.H₂O condition, eluent at 74%) to give 4 (2.88 g, 25% yield) as a white solid. ESI-LCMS: 677.1 [M+H]⁺; ¹H NMR (400 MHz, CDCl₃) δ=9.24 (s, 1H), 8.84 (s, 1H), 8.36 (s, 1H), 8.05 (br d, J=7.3 Hz, 2H), 7.66-7.42 (m, 4H), 6.16 (d, J=5.0 Hz, 1H), 4.52 (br t, J=4.5 Hz, 1H), 4.25-4.10 (m, 1H), 3.97 (br dd, J=8.0, 14.8 Hz, 1H), 3.48 (s, 3H), 3.27 (s, 3H), 1.54 (s, 9H), 0.95 (s, 9H), 0.14 (d, J=0.8 Hz, 6H).

[0336] Preparation of (5): To a solution of 4 (2.8 g, 4.14 mmol) in THF (20 mL) was added TBAF (4 M, 1.03 mL) and the mixture was stirred at 20° C. for 12 h. The reaction mixture was then evaporated. The residue was purified by flash silica gel chromatography (ISCO®; 12 g SepaFlash® Silica Flash Column, Eluent of 0˜6% MeOH/ethyl acetate gradient @ 20 mL/min) to give 5 (2.1 g, 83.92% yield) as a white solid. ESI-LCMS: 563.1[M+H]⁺; ¹H NMR (400 MHz, CDCl₃) δ=8.85-8.77 (m, 1H), 8.38 (s, 1H), 8.11-7.99 (m, 2H), 7.64-7.50 (m, 4H), 6.19 (d, J=2.8 Hz, 1H), 4.36-4.33 (m, 1H), 4.29 (br d, J=4.3 Hz, 1H), 4.22-4.02 (m, 2H), 3.65-3.59 (m, 3H), 3.28 (s, 3H), 1.54 (s, 9H).

[0337] Preparation of (6): To a solution of 5 (2.1 g, 3.73 mmol) in DCM (20 mL) was added TFA (7.70 g, 67.53 mmol, 5 mL) at 0° C. The reaction mixture was stirred at 20° C. for 24 h. Upon completion, the reaction was quenched with saturated aq. NaHCO₃ to reach pH 7. The organic layer was dried over Na₂SO₄, filtered, and evaporated at low pressure. The residue was purified by flash silica gel chromatography (ISCO®; 12 g SepaFlash® Silica Flash Column, Eluent of 0˜7% DCM/MeOH gradient @ 20 mL/min) to give 1.6 g (impure, 75% LCMS purity), followed by prep-HPLC [FA condition, column: Boston Uni C18 40*150*5 um; mobile phase: [water (0.225% FA)-ACN]; B %: 8%-38%, 7.7 min.] to give 6 (1.04 g, 63.7% yield) as a white solid. ESI-LCMS: 485.0 [M+Na]⁺; ¹H NMR (400 MHz, DMSO-d₆) δ=11.27-11.21 (m, 1H), 8.77 (s, 1H), 8.74 (s, 1H), 8.05 (d, J=7.3 Hz, 2H), 7.68-7.62 (m, 1H), 7.59-7.53 (m, 2H), 7.39 (t, J=6.3 Hz, 1H), 6.16 (d, J=6.0 Hz, 1H), 5.48 (d, J=5.5 Hz, 1H), 4.55 (t, J=5.5 Hz, 1H), 4.43-4.37 (m, 1H), 4.08-4.02 (m, 1H), 3.41-3.36 (m, 1H), 3.35 (s, 3H), 3.31-3.22 (m, 1H), 2.91 (s, 3H).

[0338] Preparation of (Example 8 monomer): To a solution of 6 (1 g, 2.16 mmol) in DCM (30 mL) was added P1 (977.58 mg, 3.24 mmol, 1.03 mL), followed by DCI (306.43 mg, 2.59 mmol) at 0° C. in one portion under Ar atmosphere. The mixture was degassed and purged with Ar for 3 times, warmed to 20° C., and stirred for 2 hr under Ar atmosphere. Upon completion as monitored by LCMS and TLC (PE:EtOAc=4:1), the reaction mixture was diluted with sat.aq. NaHCO₃ (30 mL) and extracted with DCM (50 mL*2). The combined organic layers were dried over anhydrous Na₂SO₄, filtered, and the filtrate was concentrated under reduced pressure to give a residue. The crude product was purified by reversed-phase HPLC (40 g C18 column: neutral condition, Eluent of 0˜57% of 0.3% NH₄HCO₃ in H₂O/CH₃CN ether gradient @ 35 mL/min) to give Example 8 monomer (0.49 g, 33.7% yield) as a white solid. ESI-LCMS: 663.1[M+H]⁺; ¹H NMR (400 MHz, CD₃CN) δ=1.19-1.29 (m, 12H) 2.71 (q, J=5.77 Hz, 2H) 2.94 (d, J=6.27 Hz, 3H) 3.35 (d, J=15.56 Hz, 3H) 3.40-3.52 (m, 2H) 3.61-3.97 (m, 4H) 4.23-4.45 (m, 1H) 4.55-4.74 (m, 2H) 6.02 (dd, J=10.67, 6.40 Hz, 1H) 7.25 (br s, 1H) 7.47-7.57 (m, 2H) 7.59-7.68 (m, 1H) 8.01 (d, J=7.78 Hz, 2H) 8.28 (s, 1H) 8.66 (s, 1H) 9.69 (br s, 1H); ³¹P NMR (162 MHz, CD₃CN) δ=150.92, 149.78.

### Example 9: Synthesis of 5′-stabilized End Cap Modified Oligonucleotides

[0339] This example provides an exemplary method for synthesizing the siNAs comprising a 5′-stabilized end caps disclosed herein. The 5′-stabilized end cap and/or deuterated phosphoramidites were dissolved in anhydrous acetonitrile and oligonucleotide synthesis was performed on a Expedite 8909 Synthesizer using standard phosphoramidite chemistry. An extended coupling (12 minutes) of 0.12 M solution of phosphoramidite in anhydrous CH₃CN in the presence of Benzyl-thio-tetrazole (BTT) activator to a solid bound oligonucleotide followed by standard capping, oxidation and sulfurization produced modified oligonucleotides. The 0.02 M 12, THE: Pyridine; Water 7:2:1 was used as an oxidizing agent, while DDTT (dimethylamino-methylidene) amino)-3H-1,2,4-dithiazaoline-3-thione was used as the sulfur-transfer agent for the synthesis of oligoribonucleotide with a phosphorothioate backbone. The stepwise coupling efficiency of all modified phosphoramidites was achieved around 98%. After synthesis the solid support was heated with aqueous ammonia (28%) solution at 45° C. for 16 h or 0.05 M K₂CO₃ in methanol was used to deprotect the base labile protecting groups. The crude oligonucleotides were precipitated with isopropanol and centrifuged (Eppendorf 5810R, 3000 g, 4° C., 15 min) to obtain a pellet. The crude product was then purified using ion exchange chromatography (TSK gel column, 20 mM NaH₂PO₄, 10% CH₃CN, 1 M NaBr, gradient 20-60% B over 20 column volumes) and fractions were analyzed by ion change chromatography on an HPLC. Pure fractions were pooled and desalted by Sephadex G-25 column and evaporated to dryness. The purity and molecular weight were determined by HPLC analysis and ESI-MS analysis. Single strand RNA oligonucleotides (sense and antisense strand) were annealed (1:1 by molar equivalents) at 90° C. for 3 min followed by RT 40 min) to produce the duplexes.

### Example 10: SARS-CoV-2-Nanoluc Antiviral Assay in Human ACE-2 Expressing A549 Cells

[0340] The assay has been modified from Xie X et al., 2020, Nature Communications, doi.org/10.1038/s41467-020-19055-7.

[0341] A549 cells stably expressing human ACE2 were grown in culture medium consisting of high-glucose DMEM supplemented with 10% fetal bovine serum, 1% penicillin/streptomycin, 1% HEPES and 10 μg/mL Blasticidin S. Cells were grown at 37° C. with 5% CO₂. All culture medium and antibiotics were purchased from ThermoFisher Scientific (Waltham, Mass.). SARS-CoV-2-Nluc virus was generated through inserting the nanoluciferase gene into the ORF7 gene of the infectious cDNA clone SARS-CoV-2 virus (strain 2019-nCoV/USA_WA1/2020). For SARS-CoV-2-Nluc antiviral assay, A549-hACE2 cells (12,000 cells per well in 50 ul phenol-red free medium containing 2% FBS) were plated into white opaque 96-well plate (purchased from Corning, Corning, N.Y.). On the next day, 50 ul SARS-CoV-2-Nluc virus (MOI 0.08) was added to the cells, and incubated at 37° C. with 5% CO₂ for 3 hours. Oligonucleotides were diluted in Opti-MEM medium and mixed with equal volume of diluted transfection reagent RNAiMaX (0.2 ul/well) (ThermoFisher). The transfection mixture was incubated at room temperature for 10 mins and then added to cell plate at 3 hr post infection (20 ul/well). 48 hr post infection, 60 μL Nano luciferase substrate (Promega<Madison, Wis.) were added to each well. Luciferase signals were measured using a Synergy™ Neo2 microplate reader (BioTek, Winooski, Vt.). Antiviral % inhibition was calculated as follows: [(Oligonucleotide treated cells infected sample)−(no oligonucleotide infected control)]/[(Uninfected control)−(no oligonucleotide infected control)]*100; Using GraphPad (San Diego, Calif.) prism software version 8.3.1, the antiviral dose-response plot was generated as a sigmoidal fit, log(inhibitor) vs response-variable slope (four parameters) model and the EC₅₀ was calculated which is the predicted oligonucleotide concentration corresponding to a 50% inhibition of the viral cytopathic effect.

[0342] Results for siNA assessed with this assay are shown in Table 4 at the end of the specification in column labeled “SARS-CoV-2 nanoluc hACE-2 A549 assay”.

### Example 11: Three Concentration Reporter Plasmid Luciferase and Cytotoxicity Assay in COS-7 Cells

[0343] COS-7 monkey fibroblast cells (ATCC, CRL-1651) were seeded into 96-well culture plates at 15.0×10⁴ cells/well and cultured in Dulbecco's Modified Eagle's Medium (DMEM; Hyclone, SH30022) supplemented with 10% fetal bovine serum (FBS; Sigma-Aldrich, F4135) and 1% Penicillin-Streptomycin (P/S; Corning, 30-002-CI) at 37° C. and 5% CO₂. After 6 hrs of incubation, cells were transiently transfected with psiCHECK2-SARS-CoV-2 plasmid (custom-synthesized by Genscript) at 50 ng/well using 0.3 μL of Lipofectamine 3000 transfection reagent (1:1 reagent/psi-CHECK2-SARS-CoV-2 DNA ratio; Invitrogen) in Opti-MEM (Invitrogen, 11058-021) according to the manufacturer's protocol. After overnight incubation, the medium was removed and replaced with 100 ul fresh growth media. Test siRNAs along with appropriate controls (Ambion siRNAs, ThermoFisher) were diluted to final concentration of 1, 10 or 100 nM in Opti-MEM (Invitrogen, 11058-021). Cells were then transfected with test siRNAs in duplicates using 0.3 ul/well RNAiMAX transfection reagent (1:1 ratio; Invitrogen) according to the manufacturer's protocol. After approximately 48 hrs, the culture plates were equilibrated to RT, 100 μL of Dual-Luciferase Reporter Assay reagent (Promega, E6120) were added to each well according to manufacturer's protocol. Luminescence was measured on an Envision plate reader (Perkin Elmer). The results were then quantified by calculating the ratio of renilla to firefly luciferase expression for each of the duplicates and reported as percent inhibition of luciferase activity relative to no-drug control (mock transfection with psiCHECK2-SARS-CoV-2 plasmid). The assay was repeated with a different set of plates and cytotoxicity of test siRNAs was assessed 48 hrs post treatment of COS-7 cells. The cells were lysed and assayed with Cell-Titer Glo reagent (Promega) according to the manufacturer's protocol.

[0344] Results for siNA assessed with this assay are shown in Table 4 at the end of the specification in column labeled “pSiCHECK-2 reporter assay Cos-7 at least 50% inhibition”. The data was reported as % viability relative to no-drug control (mock transfection with psiCHECK2-SARS-CoV-2 plasmid).

### Example 12: Reporter Plasmid Luciferase and Cytotoxicity Assay in Cos7 Cells

[0345] COS-7 monkey fibroblast cells (ATCC, CRL-1651) were seeded into 96-well culture plates at 15.0×10⁴ cells/well and cultured in Dulbecco's Modified Eagle's Medium (DMEM; Hyclone, SH30022) supplemented with 10% fetal bovine serum (FBS; Sigma-Aldrich, F4135) and 1% Penicillin-Streptomycin (P/S; Corning, 30-002-CI) at 37° C. and 5% CO₂. After 6 hrs of incubation, cells were transiently transfected with psiCHECK2-SARS-CoV-2 plasmid (custom-synthesized by Genscript) at 50 ng/well using 0.3 μL of Lipofectamine 3000 transfection reagent (1:1 reagent/psi-CHECK2-SARS-CoV-2 DNA ratio; Invitrogen) in Opti-MEM (Invitrogen, 11058-021) according to the manufacturer's protocol. After overnight incubation, the medium was removed and replaced with 100 ul fresh growth media. Test siRNAs along with appropriate controls (Ambion siRNAs, ThermoFisher) were serially diluted in Opti-MEM (Invitrogen, 11058-021). Cells were then transfected with test siRNAs in duplicates using 0.3 ul/well RNAiMAX transfection reagent (1:1 ratio; Invitrogen) according to the manufacturer's protocol. After approximately 48 hrs, the culture plates were equilibrated to RT, 100 μL of Dual-Luciferase Reporter Assay reagent (Promega, E6120) were added to each well according to manufacturer's protocol. Luminescence was measured on an Envision plate reader (Perkin Elmer). The results were then quantified by calculating the ratio of renilla to firefly luciferase expression for each of the duplicates and reported as percent inhibition of luciferase activity relative to no-drug control (mock transfection with psiCHECK2-SARS-CoV-2 plasmid) and dose-response curves were fitted by non-linear regression with variable slope (four parameters). Statistical analysis was performed in GraphPad Prism 8.3.1 (San Diego, Calif.) and the EC₅₀ was calculated which is the predicted oligonucleotide concentration corresponding to a 50% inhibition of the luciferase activity. The assay was repeated with a different set of plates and cytotoxicity of test siRNAs was assessed 48 hrs post treatment of COS-7 cells. The cells were lysed and assayed with Cell-Titer Glo reagent (Promega) according to the manufacturer's protocol.

[0346] Results for siNA assessed with this assay are shown in Table 4 at the end of the specification in column labeled “pSiCHECK-2 reporter assay Cos-7”. The data was reported as % viability relative to no-drug control (mock transfection with psiCHECK2-SARS-CoV-2 plasmid) and dose-response curves were fitted by non-linear regression with variable slope (four parameters) using GraphPad prism software version 8.3.1.

[0347] All patents and publications mentioned in the specification are indicative of the levels of those of ordinary skill in the art to which the disclosure pertains. All patents and publications are herein incorporated by reference to the same extent as if each individual publication was specifically and individually indicated to be incorporated by reference.

[0348] Further, one skilled in the art readily appreciates that the present disclosure is well adapted to carry out the objects and obtain the ends and advantages mentioned, as well as those inherent therein. Modifications therein and other uses will occur to those skilled in the art. These modifications are encompassed within the spirit of the disclosure and are defined by the scope of the claims, which set forth non-limiting embodiments of the disclosure.

TABLE 1
Oligonucleotide Target Sequences

| | | | | | | |
|---|---|---|---|---|---|---|
| | | | SEQ | Target | SEQ | Target reverse |
| | Start on | End on | ID | forward sequence | ID | complement sequence |
| Alias | target | target | NO | (sense strand) | NO | (antisense strand) |

19-Mer Target Sequences

| | | | | | | |
|---|---|---|---|---|---|---|
| NC_045512.2_19mer_win1_00190 | 190 | 208 | 1 | CTGCTTACGGTTTCGTCCG | 1204 | CGGACGAAACCGTAAGCAG |
| NC_045512.2_19mer_win1_00191 | 191 | 209 | 2 | TGCTTACGGTTTCGTCCGT | 1205 | ACGGACGAAACCGTAAGCA |
| NC_045512.2_19mer_win1_00192 | 192 | 210 | 3 | GCTTACGGTTTCGTCCGTG | 1206 | CACGGACGAAACCGTAAGC |
| NC_045512.2_19mer_win1_00193 | 193 | 211 | 4 | CTTACGGTTTCGTCCGTGT | 1207 | ACACGGACGAAACCGTAAG |
| NC_045512.2_19mer_win1_00194 | 194 | 212 | 5 | TTACGGTTTCGTCCGTGTT | 1208 | AACACGGACGAAACCGTAA |
| NC_045512.2_19mer_win1_00195 | 195 | 213 | 6 | TACGGTTTCGTCCGTGTTG | 1209 | CAACACGGACGAAACCGTA |
| NC_045512.2_19mer_win1_00196 | 196 | 214 | 7 | ACGGTTTCGTCCGTGTTGC | 1210 | GCAACACGGACGAAACCGT |
| NC_045512.2_19mer_win1_00197 | 197 | 215 | 8 | CGGTTTCGTCCGTGTTGCA | 1211 | TGCAACACGGACGAAACCG |
| NC_045512.2_19mer_win1_00198 | 198 | 216 | 9 | GGTTTCGTCCGTGTTGCAG | 1212 | CTGCAACACGGACGAAACC |
| NC_045512.2_19mer_win1_00233 | 233 | 251 | 10 | CTAGGTTTCGTCCGGGTGT | 1213 | ACACCCGGACGAAACCTAG |
| NC_045512.2_19mer_win1_00234 | 234 | 252 | 11 | TAGGTTTCGTCCGGGTGTG | 1214 | CACACCCGGACGAAACCTA |
| NC_045512.2_19mer_win1_00235 | 235 | 253 | 12 | AGGTTTCGTCCGGGTGTGA | 1215 | TCACACCCGGACGAAACCT |
| NC_045512.2_19mer_win1_00236 | 236 | 254 | 13 | GGTTTCGTCCGGGTGTGAC | 1216 | GTCACACCCGGACGAAACC |
| NC_045512.2_19mer_win1_00237 | 237 | 255 | 14 | GTTTCGTCCGGGTGTGACC | 1217 | GGTCACACCCGGACGAAAC |
| NC_045512.2_19mer_win1_00238 | 238 | 256 | 15 | TTTCGTCCGGGTGTGACCG | 1218 | CGGTCACACCCGGACGAAA |
| NC_045512.2_19mer_win1_00239 | 239 | 257 | 16 | TTCGTCCGGGTGTGACCGA | 1219 | TCGGTCACACCCGGACGAA |
| NC_045512.2_19mer_win1_00240 | 240 | 258 | 17 | TCGTCCGGGTGTGACCGAA | 1220 | TTCGGTCACACCCGGACGA |
| NC_045512.2_19mer_win1_00241 | 241 | 259 | 18 | CGTCCGGGTGTGACCGAAA | 1221 | TTTCGGTCACACCCGGACG |
| NC_045512.2_19mer_win1_00242 | 242 | 260 | 19 | GTCCGGGTGTGACCGAAAG | 1222 | CTTTCGGTCACACCCGGAC |
| NC_045512.2_19mer_win1_00243 | 243 | 261 | 20 | TCCGGGTGTGACCGAAAGG | 1223 | CCTTTCGGTCACACCCGGA |
| NC_045512.2_19mer_win1_00244 | 244 | 262 | 21 | CCGGGTGTGACCGAAAGGT | 1224 | ACCTTTCGGTCACACCCGG |
| NC_045512.2_19mer_win1_00245 | 245 | 263 | 22 | CGGGTGTGACCGAAAGGTA | 1225 | TACCTTTCGGTCACACCCG |
| NC_045512.2_19mer_win1_00246 | 246 | 264 | 23 | GGGTGTGACCGAAAGGTAA | 1226 | TTACCTTTCGGTCACACCC |
| NC_045512.2_19mer_win1_00247 | 247 | 265 | 24 | GGTGTGACCGAAAGGTAAG | 1227 | CTTACCTTTCGGTCACACC |
| NC_045512.2_19mer_win1_00248 | 248 | 266 | 25 | GTGTGACCGAAAGGTAAGA | 1228 | TCTTACCTTTCGGTCACAC |
| NC_045512.2_19mer_win1_00249 | 249 | 267 | 26 | TGTGACCGAAAGGTAAGAT | 1229 | ATCTTACCTTTCGGTCACA |
| NC_045512.2_19mer_win1_00250 | 250 | 268 | 27 | GTGACCGAAAGGTAAGATG | 1230 | CATCTTACCTTTCGGTCAC |
| NC_045512.2_19mer_win1_00251 | 251 | 269 | 28 | TGACCGAAAGGTAAGATGG | 1231 | CCATCTTACCTTTCGGTCA |
| NC_045512.2_19mer_win1_00252 | 252 | 270 | 29 | GACCGAAAGGTAAGATGGA | 1232 | TCCATCTTACCTTTCGGTC |
| NC_045512.2_19mer_win1_00253 | 253 | 271 | 30 | ACCGAAAGGTAAGATGGAG | 1233 | CTCCATCTTACCTTTCGGT |
| NC_045512.2_19mer_win1_00254 | 254 | 272 | 31 | CCGAAAGGTAAGATGGAGA | 1234 | TCTCCATCTTACCTTTCGG |
| NC_045512.2_19mer_win1_00255 | 255 | 273 | 32 | CGAAAGGTAAGATGGAGAG | 1235 | CTCTCCATCTTACCTTTCG |
| NC_045512.2_19mer_win1_00256 | 256 | 274 | 33 | GAAAGGTAAGATGGAGAGC | 1236 | GCTCTCCATCTTACCTTTC |
| NC_045512.2_19mer_win1_00257 | 257 | 275 | 34 | AAAGGTAAGATGGAGAGCC | 1237 | GGCTCTCCATCTTACCTTT |
| NC_045512.2_19mer_win1_00258 | 258 | 276 | 35 | AAGGTAAGATGGAGAGCCT | 1238 | AGGCTCTCCATCTTACCTT |
| NC_045512.2_19mer_win1_00259 | 259 | 277 | 36 | AGGTAAGATGGAGAGCCTT | 1239 | AAGGCTCTCCATCTTACCT |
| NC_045512.2_19mer_win1_00260 | 260 | 278 | 37 | GGTAAGATGGAGAGCCTTG | 1240 | CAAGGCTCTCCATCTTACC |
| NC_045512.2_19mer_win1_00261 | 261 | 279 | 38 | GTAAGATGGAGAGCCTTGT | 1241 | ACAAGGCTCTCCATCTTAC |
| NC_045512.2_19mer_win1_00288 | 288 | 306 | 39 | TCAACGAGAAAACACACGT | 1242 | ACGTGTGTTTTCTCGTTGA |
| NC_045512.2_19mer_win1_00289 | 289 | 307 | 40 | CAACGAGAAAACACACGTC | 1243 | GACGTGTGTTTTCTCGTTG |
| NC_045512.2_19mer_win1_00290 | 290 | 308 | 41 | AACGAGAAAACACACGTCC | 1244 | GGACGTGTGTTTTCTCGTT |
| NC_045512.2_19mer_win1_00291 | 291 | 309 | 42 | ACGAGAAAACACACGTCCA | 1245 | TGGACGTGTGTTTTCTCGT |
| NC_045512.2_19mer_win1_00292 | 292 | 310 | 43 | CGAGAAAACACACGTCCAA | 1246 | TTGGACGTGTGTTTTCTCG |
| NC_045512.2_19mer_win1_00293 | 293 | 311 | 44 | GAGAAAACACACGTCCAAC | 1247 | GTTGGACGTGTGTTTTCTC |
| NC_045512.2_19mer_win1_00294 | 294 | 312 | 45 | AGAAAACACACGTCCAACT | 1248 | AGTTGGACGTGTGTTTTCT |
| NC_045512.2_19mer_win1_00295 | 295 | 313 | 46 | GAAAACACACGTCCAACTC | 1249 | GAGTTGGACGTGTGTTTTC |
| NC_045512.2_19mer_win1_00296 | 296 | 314 | 47 | AAAACACACGTCCAACTCA | 1250 | TGAGTTGGACGTGTGTTTT |
| NC_045512.2_19mer_win1_00297 | 297 | 315 | 48 | AAACACACGTCCAACTCAG | 1251 | CTGAGTTGGACGTGTGTTT |
| NC_045512.2_19mer_win1_00298 | 298 | 316 | 49 | AACACACGTCCAACTCAGT | 1252 | ACTGAGTTGGACGTGTGTT |
| NC_045512.2_19mer_win1_00299 | 299 | 317 | 50 | ACACACGTCCAACTCAGTT | 1253 | AACTGAGTTGGACGTGTGT |
| NC_045512.2_19mer_win1_00300 | 300 | 318 | 51 | CACACGTCCAACTCAGTTT | 1254 | AAACTGAGTTGGACGTGTG |
| NC_045512.2_19mer_win1_00301 | 301 | 319 | 52 | ACACGTCCAACTCAGTTTG | 1255 | CAAACTGAGTTGGACGTGT |
| NC_045512.2_19mer_win1_00302 | 302 | 320 | 53 | CACGTCCAACTCAGTTTGC | 1256 | GCAAACTGAGTTGGACGTG |
| NC_045512.2_19mer_win1_00303 | 303 | 321 | 54 | ACGTCCAACTCAGTTTGCC | 1257 | GGCAAACTGAGTTGGACGT |
| NC_045512.2_19mer_win1_00304 | 304 | 322 | 55 | CGTCCAACTCAGTTTGCCT | 1258 | AGGCAAACTGAGTTGGACG |
| NC_045512.2_19mer_win1_00305 | 305 | 323 | 56 | GTCCAACTCAGTTTGCCTG | 1259 | CAGGCAAACTGAGTTGGAC |
| NC_045512.2_19mer_win1_00306 | 306 | 324 | 57 | TCCAACTCAGTTTGCCTGT | 1260 | ACAGGCAAACTGAGTTGGA |
| NC_045512.2_19mer_win1_00455 | 455 | 473 | 58 | CTTGAACAGCCCTATGTGT | 1261 | ACACATAGGGCTGTTCAAG |
| NC_045512.2_19mer_win1_00456 | 456 | 474 | 59 | TTGAACAGCCCTATGTGTT | 1262 | AACACATAGGGCTGTTCAA |
| NC_045512.2_19mer_win1_00457 | 457 | 475 | 60 | TGAACAGCCCTATGTGTTC | 1263 | GAACACATAGGGCTGTTCA |
| NC_045512.2_19mer_win1_00458 | 458 | 476 | 61 | GAACAGCCCTATGTGTTCA | 1264 | TGAACACATAGGGCTGTTC |
| NC_045512.2_19mer_win1_00459 | 459 | 477 | 62 | AACAGCCCTATGTGTTCAT | 1265 | ATGAACACATAGGGCTGTT |
| NC_045512.2_19mer_win1_00626 | 626 | 644 | 63 | GTTCTTCTTCGTAAGAACG | 1266 | CGTTCTTACGAAGAAGAAC |
| NC_045512.2_19mer_win1_00627 | 627 | 645 | 64 | TTCTTCTTCGTAAGAACGG | 1267 | CCGTTCTTACGAAGAAGAA |
| NC_045512.2_19mer_win1_00628 | 628 | 646 | 65 | TCTTCTTCGTAAGAACGGT | 1268 | ACCGTTCTTACGAAGAAGA |
| NC_045512.2_19mer_win1_00629 | 629 | 647 | 66 | CTTCTTCGTAAGAACGGTA | 1269 | TACCGTTCTTACGAAGAAG |
| NC_045512.2_19mer_win1_00630 | 630 | 648 | 67 | TTCTTCGTAAGAACGGTAA | 1270 | TTACCGTTCTTACGAAGAA |
| NC_045512.2_19mer_win1_00631 | 631 | 649 | 68 | TCTTCGTAAGAACGGTAAT | 1271 | ATTACCGTTCTTACGAAGA |
| NC_045512.2_19mer_win1_00632 | 632 | 650 | 69 | CTTCGTAAGAACGGTAATA | 1272 | TATTACCGTTCTTACGAAG |
| NC_045512.2_19mer_win1_00633 | 633 | 651 | 70 | TTCGTAAGAACGGTAATAA | 1273 | TTATTACCGTTCTTACGAA |
| NC_045512.2_19mer_win1_00704 | 704 | 722 | 71 | GACGAGCTTGGCACTGATC | 1274 | GATCAGTGCCAAGCTCGTC |
| NC_045512.2_19mer_win1_00705 | 705 | 723 | 72 | ACGAGCTTGGCACTGATCC | 1275 | GGATCAGTGCCAAGCTCGT |
| NC_045512.2_19mer_win1_03352 | 3352 | 3370 | 73 | TGGTTATTTAAAACTTACT | 1276 | AGTAAGTTTTAAATAACCA |
| NC_045512.2_19mer_win1_03353 | 3353 | 3371 | 74 | GGTTATTTAAAACTTACTG | 1277 | CAGTAAGTTTTAAATAACC |
| NC_045512.2_19mer_win1_03354 | 3354 | 3372 | 75 | GTTATTTAAAACTTACTGA | 1278 | TCAGTAAGTTTTAAATAAC |
| NC_045512.2_19mer_win1_03355 | 3355 | 3373 | 76 | TTATTTAAAACTTACTGAC | 1279 | GTCAGTAAGTTTTAAATAA |
| NC_045512.2_19mer_win1_03356 | 3356 | 3374 | 77 | TATTTAAAACTTACTGACA | 1280 | TGTCAGTAAGTTTTAAATA |
| NC_045512.2_19mer_win1_03357 | 3357 | 3375 | 78 | ATTTAAAACTTACTGACAA | 1281 | TTGTCAGTAAGTTTTAAAT |
| NC_045512.2_19mer_win1_03358 | 3358 | 3376 | 79 | TTTAAAACTTACTGACAAT | 1282 | ATTGTCAGTAAGTTTTAAA |
| NC_045512.2_19mer_win1_03359 | 3359 | 3377 | 80 | TTAAAACTTACTGACAATG | 1283 | CATTGTCAGTAAGTTTTAA |
| NC_045512.2_19mer_win1_03360 | 3360 | 3378 | 81 | TAAAACTTACTGACAATGT | 1284 | ACATTGTCAGTAAGTTTTA |
| NC_045512.2_19mer_win1_05384 | 5384 | 5402 | 82 | GCTGCTAACTTTTGTGCAC | 1285 | GTGCACAAAAGTTAGCAGC |
| NC_045512.2_19mer_win1_05385 | 5385 | 5403 | 83 | CTGCTAACTTTTGTGCACT | 1286 | AGTGCACAAAAGTTAGCAG |
| NC_045512.2_19mer_win1_06406 | 6406 | 6424 | 84 | CTCTGAAGAAGTAGTGGAA | 1287 | TTCCACTACTTCTTCAGAG |
| NC_045512.2_19mer_win1_06407 | 6407 | 6425 | 85 | TCTGAAGAAGTAGTGGAAA | 1288 | TTTCCACTACTTCTTCAGA |
| NC_045512.2_19mer_win1_06408 | 6408 | 6426 | 86 | CTGAAGAAGTAGTGGAAAA | 1289 | TTTTCCACTACTTCTTCAG |
| NC_045512.2_19mer_win1_06409 | 6409 | 6427 | 87 | TGAAGAAGTAGTGGAAAAT | 1290 | ATTTTCCACTACTTCTTCA |
| NC_045512.2_19mer_win1_06410 | 6410 | 6428 | 88 | GAAGAAGTAGTGGAAAATC | 1291 | GATTTTCCACTACTTCTTC |
| NC_045512.2_19mer_win1_06411 | 6411 | 6429 | 89 | AAGAAGTAGTGGAAAATCC | 1292 | GGATTTTCCACTACTTCTT |
| NC_045512.2_19mer_win1_06412 | 6412 | 6430 | 90 | AGAAGTAGTGGAAAATCCT | 1293 | AGGATTTTCCACTACTTCT |
| NC_045512.2_19mer_win1_06413 | 6413 | 6431 | 91 | GAAGTAGTGGAAAATCCTA | 1294 | TAGGATTTTCCACTACTTC |
| NC_045512.2_19mer_win1_06414 | 6414 | 6432 | 92 | AAGTAGTGGAAAATCCTAC | 1295 | GTAGGATTTTCCACTACTT |
| NC_045512.2_19mer_win1_06415 | 6415 | 6433 | 93 | AGTAGTGGAAAATCCTACC | 1296 | GGTAGGATTTTCCACTACT |
| NC_045512.2_19mer_win1_06461 | 6461 | 6479 | 94 | GTGAAAACTACCGAAGTTG | 1297 | CAACTTCGGTAGTTTTCAC |
| NC_045512.2_19mer_win1_06462 | 6462 | 6480 | 95 | TGAAAACTACCGAAGTTGT | 1298 | ACAACTTCGGTAGTTTTCA |
| NC_045512.2_19mer_win1_06463 | 6463 | 6481 | 96 | GAAAACTACCGAAGTTGTA | 1299 | TACAACTTCGGTAGTTTTC |
| NC_045512.2_19mer_win1_06464 | 6464 | 6482 | 97 | AAAACTACCGAAGTTGTAG | 1300 | CTACAACTTCGGTAGTTTT |
| NC_045512.2_19mer_win1_06465 | 6465 | 6483 | 98 | AAACTACCGAAGTTGTAGG | 1301 | CCTACAACTTCGGTAGTTT |
| NC_045512.2_19mer_win1_07532 | 7532 | 7550 | 99 | TGTACAACTATTGTTAATG | 1302 | CATTAACAATAGTTGTACA |
| NC_045512.2_19mer_win1_07533 | 7533 | 7551 | 100 | GTACAACTATTGTTAATGG | 1303 | CCATTAACAATAGTTGTAC |
| NC_045512.2_19mer_win1_09588 | 9588 | 9606 | 101 | TTTACTTGTACTTGACATT | 1304 | AATGTCAAGTACAAGTAAA |
| NC_045512.2_19mer_win1_10484 | 10484 | 10502 | 102 | TCATGTGGTAGTGTTGGTT | 1305 | AACCAACACTACCACATGA |
| NC_045512.2_19mer_win1_10485 | 10485 | 10503 | 103 | CATGTGGTAGTGTTGGTTT | 1306 | AAACCAACACTACCACATG |
| NC_045512.2_19mer_win1_10486 | 10486 | 10504 | 104 | ATGTGGTAGTGTTGGTTTT | 1307 | AAAACCAACACTACCACAT |
| NC_045512.2_19mer_win1_10487 | 10487 | 10505 | 105 | TGTGGTAGTGTTGGTTTTA | 1308 | TAAAACCAACACTACCACA |
| NC_045512.2_19mer_win1_10488 | 10488 | 10506 | 106 | GTGGTAGTGTTGGTTTTAA | 1309 | TTAAAACCAACACTACCAC |
| NC_045512.2_19mer_win1_10489 | 10489 | 10507 | 107 | TGGTAGTGTTGGTTTTAAC | 1310 | GTTAAAACCAACACTACCA |
| NC_045512.2_19mer_win1_10490 | 10490 | 10508 | 108 | GGTAGTGTTGGTTTTAACA | 1311 | TGTTAAAACCAACACTACC |
| NC_045512.2_19mer_win1_10491 | 10491 | 10509 | 109 | GTAGTGTTGGTTTTAACAT | 1312 | ATGTTAAAACCAACACTAC |
| NC_045512.2_19mer_win1_11609 | 11609 | 11627 | 110 | GTTTATTGTTTCTTAGGCT | 1313 | AGCCTAAGAAACAATAAAC |
| NC_045512.2_19mer_win1_11610 | 11610 | 11628 | 111 | TTTATTGTTTCTTAGGCTA | 1314 | TAGCCTAAGAAACAATAAA |
| NC_045512.2_19mer_win1_11611 | 11611 | 11629 | 112 | TTATTGTTTCTTAGGCTAT | 1315 | ATAGCCTAAGAAACAATAA |
| NC_045512.2_19mer_win1_11612 | 11612 | 11630 | 113 | TATTGTTTCTTAGGCTATT | 1316 | AATAGCCTAAGAAACAATA |
| NC_045512.2_19mer_win1_11834 | 11834 | 11852 | 114 | ACTGTACAGTCTAAAATGT | 1317 | ACATTTTAGACTGTACAGT |
| NC_045512.2_19mer_win1_11835 | 11835 | 11853 | 115 | CTGTACAGTCTAAAATGTC | 1318 | GACATTTTAGACTGTACAG |
| NC_045512.2_19mer_win1_12023 | 12023 | 12041 | 116 | TCCATGCAGGGTGCTGTAG | 1319 | CTACAGCACCCTGCATGGA |
| NC_045512.2_19mer_win1_12024 | 12024 | 12042 | 117 | CCATGCAGGGTGCTGTAGA | 1320 | TCTACAGCACCCTGCATGG |
| NC_045512.2_19mer_win1_12025 | 12025 | 12043 | 118 | CATGCAGGGTGCTGTAGAC | 1321 | GTCTACAGCACCCTGCATG |
| NC_045512.2_19mer_win1_12026 | 12026 | 12044 | 119 | ATGCAGGGTGCTGTAGACA | 1322 | TGTCTACAGCACCCTGCAT |
| NC_045512.2_19mer_win1_12027 | 12027 | 12045 | 120 | TGCAGGGTGCTGTAGACAT | 1323 | ATGTCTACAGCACCCTGCA |
| NC_045512.2_19mer_win1_12212 | 12212 | 12230 | 121 | TCTTTGAATGTGGCTAAAT | 1324 | ATTTAGCCACATTCAAAGA |
| NC_045512.2_19mer_win1_12213 | 12213 | 12231 | 122 | CTTTGAATGTGGCTAAATC | 1325 | GATTTAGCCACATTCAAAG |
| NC_045512.2_19mer_win1_12214 | 12214 | 12232 | 123 | TTTGAATGTGGCTAAATCT | 1326 | AGATTTAGCCACATTCAAA |
| NC_045512.2_19mer_win1_12215 | 12215 | 12233 | 124 | TTGAATGTGGCTAAATCTG | 1327 | CAGATTTAGCCACATTCAA |
| NC_045512.2_19mer_win1_12216 | 12216 | 12234 | 125 | TGAATGTGGCTAAATCTGA | 1328 | TCAGATTTAGCCACATTCA |
| NC_045512.2_19mer_win1_12401 | 12401 | 12419 | 126 | AACAACATTATCAACAATG | 1329 | CATTGTTGATAATGTTGTT |
| NC_045512.2_19mer_win1_12402 | 12402 | 12420 | 127 | ACAACATTATCAACAATGC | 1330 | GCATTGTTGATAATGTTGT |
| NC_045512.2_19mer_win1_12839 | 12839 | 12857 | 128 | AAATGGGCTAGATTCCCTA | 1331 | TAGGGAATCTAGCCCATTT |
| NC_045512.2_19mer_win1_12840 | 12840 | 12858 | 129 | AATGGGCTAGATTCCCTAA | 1332 | TTAGGGAATCTAGCCCATT |
| NC_045512.2_19mer_win1_12841 | 12841 | 12859 | 130 | ATGGGCTAGATTCCCTAAG | 1333 | CTTAGGGAATCTAGCCCAT |
| NC_045512.2_19mer_win1_12842 | 12842 | 12860 | 131 | TGGGCTAGATTCCCTAAGA | 1334 | TCTTAGGGAATCTAGCCCA |
| NC_045512.2_19mer_win1_12843 | 12843 | 12861 | 132 | GGGCTAGATTCCCTAAGAG | 1335 | CTCTTAGGGAATCTAGCCC |
| NC_045512.2_19mer_win1_12844 | 12844 | 12862 | 133 | GGCTAGATTCCCTAAGAGT | 1336 | ACTCTTAGGGAATCTAGCC |
| NC_045512.2_19mer_win1_12845 | 12845 | 12863 | 134 | GCTAGATTCCCTAAGAGTG | 1337 | CACTCTTAGGGAATCTAGC |
| NC_045512.2_19mer_win1_12846 | 12846 | 12864 | 135 | CTAGATTCCCTAAGAGTGA | 1338 | TCACTCTTAGGGAATCTAG |
| NC_045512.2_19mer_win1_12847 | 12847 | 12865 | 136 | TAGATTCCCTAAGAGTGAT | 1339 | ATCACTCTTAGGGAATCTA |
| NC_045512.2_19mer_win1_12848 | 12848 | 12866 | 137 | AGATTCCCTAAGAGTGATG | 1340 | CATCACTCTTAGGGAATCT |
| NC_045512.2_19mer_win1_12849 | 12849 | 12867 | 138 | GATTCCCTAAGAGTGATGG | 1341 | CCATCACTCTTAGGGAATC |
| NC_045512.2_19mer_win1_12885 | 12885 | 12903 | 139 | CAGAACTGGAACCACCTTG | 1342 | CAAGGTGGTTCCAGTTCTG |
| NC_045512.2_19mer_win1_12886 | 12886 | 12904 | 140 | AGAACTGGAACCACCTTGT | 1343 | ACAAGGTGGTTCCAGTTCT |
| NC_045512.2_19mer_win1_12887 | 12887 | 12905 | 141 | GAACTGGAACCACCTTGTA | 1344 | TACAAGGTGGTTCCAGTTC |
| NC_045512.2_19mer_win1_12888 | 12888 | 12906 | 142 | AACTGGAACCACCTTGTAG | 1345 | CTACAAGGTGGTTCCAGTT |
| NC_045512.2_19mer_win1_12889 | 12889 | 12907 | 143 | ACTGGAACCACCTTGTAGG | 1346 | CCTACAAGGTGGTTCCAGT |
| NC_045512.2_19mer_win1_12890 | 12890 | 12908 | 144 | CTGGAACCACCTTGTAGGT | 1347 | ACCTACAAGGTGGTTCCAG |
| NC_045512.2_19mer_win1_12891 | 12891 | 12909 | 145 | TGGAACCACCTTGTAGGTT | 1348 | AACCTACAAGGTGGTTCCA |
| NC_045512.2_19mer_win1_12892 | 12892 | 12910 | 146 | GGAACCACCTTGTAGGTTT | 1349 | AAACCTACAAGGTGGTTCC |
| NC_045512.2_19mer_win1_12893 | 12893 | 12911 | 147 | GAACCACCTTGTAGGTTTG | 1350 | CAAACCTACAAGGTGGTTC |
| NC_045512.2_19mer_win1_12894 | 12894 | 12912 | 148 | AACCACCTTGTAGGTTTGT | 1351 | ACAAACCTACAAGGTGGTT |
| NC_045512.2_19mer_win1_12895 | 12895 | 12913 | 149 | ACCACCTTGTAGGTTTGTT | 1352 | AACAAACCTACAAGGTGGT |
| NC_045512.2_19mer_win1_12896 | 12896 | 12914 | 150 | CCACCTTGTAGGTTTGTTA | 1353 | TAACAAACCTACAAGGTGG |
| NC_045512.2_19mer_win1_12897 | 12897 | 12915 | 151 | CACCTTGTAGGTTTGTTAC | 1354 | GTAACAAACCTACAAGGTG |
| NC_045512.2_19mer_win1_12898 | 12898 | 12916 | 152 | ACCTTGTAGGTTTGTTACA | 1355 | TGTAACAAACCTACAAGGT |
| NC_045512.2_19mer_win1_12899 | 12899 | 12917 | 153 | CCTTGTAGGTTTGTTACAG | 1356 | CTGTAACAAACCTACAAGG |
| NC_045512.2_19mer_win1_12900 | 12900 | 12918 | 154 | CTTGTAGGTTTGTTACAGA | 1357 | TCTGTAACAAACCTACAAG |
| NC_045512.2_19mer_win1_12901 | 12901 | 12919 | 155 | TTGTAGGTTTGTTACAGAC | 1358 | GTCTGTAACAAACCTACAA |
| NC_045512.2_19mer_win1_12902 | 12902 | 12920 | 156 | TGTAGGTTTGTTACAGACA | 1359 | TGTCTGTAACAAACCTACA |
| NC_045512.2_19mer_win1_12903 | 12903 | 12921 | 157 | GTAGGTTTGTTACAGACAC | 1360 | GTGTCTGTAACAAACCTAC |
| NC_045512.2_19mer_win1_12904 | 12904 | 12922 | 158 | TAGGTTTGTTACAGACACA | 1361 | TGTGTCTGTAACAAACCTA |
| NC_045512.2_19mer_win1_12905 | 12905 | 12923 | 159 | AGGTTTGTTACAGACACAC | 1362 | GTGTGTCTGTAACAAACCT |
| NC_045512.2_19mer_win1_12906 | 12906 | 12924 | 160 | GGTTTGTTACAGACACACC | 1363 | GGTGTGTCTGTAACAAACC |
| NC_045512.2_19mer_win1_12966 | 12966 | 12984 | 161 | TAAACAACCTAAATAGAGG | 1364 | CCTCTATTTAGGTTGTTTA |
| NC_045512.2_19mer_win1_12967 | 12967 | 12985 | 162 | AAACAACCTAAATAGAGGT | 1365 | ACCTCTATTTAGGTTGTTT |
| NC_045512.2_19mer_win1_12968 | 12968 | 12986 | 163 | AACAACCTAAATAGAGGTA | 1366 | TACCTCTATTTAGGTTGTT |
| NC_045512.2_19mer_win1_12969 | 12969 | 12987 | 164 | ACAACCTAAATAGAGGTAT | 1367 | ATACCTCTATTTAGGTTGT |
| NC_045512.2_19mer_win1_12970 | 12970 | 12988 | 165 | CAACCTAAATAGAGGTATG | 1368 | CATACCTCTATTTAGGTTG |
| NC_045512.2_19mer_win1_12971 | 12971 | 12989 | 166 | AACCTAAATAGAGGTATGG | 1369 | CCATACCTCTATTTAGGTT |
| NC_045512.2_19mer_win1_12972 | 12972 | 12990 | 167 | ACCTAAATAGAGGTATGGT | 1370 | ACCATACCTCTATTTAGGT |
| NC_045512.2_19mer_win1_13151 | 13151 | 13169 | 168 | AAGATGTTGTGTACACACA | 1371 | TGTGTGTACACAACATCTT |
| NC_045512.2_19mer_win1_13152 | 13152 | 13170 | 169 | AGATGTTGTGTACACACAC | 1372 | GTGTGTGTACACAACATCT |
| NC_045512.2_19mer_win1_13153 | 13153 | 13171 | 170 | GATGTTGTGTACACACACT | 1373 | AGTGTGTGTACACAACATC |
| NC_045512.2_19mer_win1_13154 | 13154 | 13172 | 171 | ATGTTGTGTACACACACTG | 1374 | CAGTGTGTGTACACAACAT |
| NC_045512.2_19mer_win1_13155 | 13155 | 13173 | 172 | TGTTGTGTACACACACTGG | 1375 | CCAGTGTGTGTACACAACA |
| NC_045512.2_19mer_win1_13156 | 13156 | 13174 | 173 | GTTGTGTACACACACTGGT | 1376 | ACCAGTGTGTGTACACAAC |
| NC_045512.2_19mer_win1_13157 | 13157 | 13175 | 174 | TTGTGTACACACACTGGTA | 1377 | TACCAGTGTGTGTACACAA |
| NC_045512.2_19mer_win1_13158 | 13158 | 13176 | 175 | TGTGTACACACACTGGTAC | 1378 | GTACCAGTGTGTGTACACA |
| NC_045512.2_19mer_win1_13363 | 13363 | 13381 | 176 | AAACACAGTCTGTACCGTC | 1379 | GACGGTACAGACTGTGTTT |
| NC_045512.2_19mer_win1_13364 | 13364 | 13382 | 177 | AACACAGTCTGTACCGTCT | 1380 | AGACGGTACAGACTGTGTT |
| NC_045512.2_19mer_win1_13365 | 13365 | 13383 | 178 | ACACAGTCTGTACCGTCTG | 1381 | CAGACGGTACAGACTGTGT |
| NC_045512.2_19mer_win1_13366 | 13366 | 13384 | 179 | CACAGTCTGTACCGTCTGC | 1382 | GCAGACGGTACAGACTGTG |
| NC_045512.2_19mer_win1_13367 | 13367 | 13385 | 180 | ACAGTCTGTACCGTCTGCG | 1383 | CGCAGACGGTACAGACTGT |
| NC_045512.2_19mer_win1_13368 | 13368 | 13386 | 181 | CAGTCTGTACCGTCTGCGG | 1384 | CCGCAGACGGTACAGACTG |
| NC_045512.2_19mer_win1_13388 | 13388 | 13406 | 182 | ATGTGGAAAGGTTATGGCT | 1385 | AGCCATAACCTTTCCACAT |
| NC_045512.2_19mer_win1_13389 | 13389 | 13407 | 183 | TGTGGAAAGGTTATGGCTG | 1386 | CAGCCATAACCTTTCCACA |
| NC_045512.2_19mer_win1_13390 | 13390 | 13408 | 184 | GTGGAAAGGTTATGGCTGT | 1387 | ACAGCCATAACCTTTCCAC |
| NC_045512.2_19mer_win1_13391 | 13391 | 13409 | 185 | TGGAAAGGTTATGGCTGTA | 1388 | TACAGCCATAACCTTTCCA |
| NC_045512.2_19mer_win1_13392 | 13392 | 13410 | 186 | GGAAAGGTTATGGCTGTAG | 1389 | CTACAGCCATAACCTTTCC |
| NC_045512.2_19mer_win1_13393 | 13393 | 13411 | 187 | GAAAGGTTATGGCTGTAGT | 1390 | ACTACAGCCATAACCTTTC |
| NC_045512.2_19mer_win1_13394 | 13394 | 13412 | 188 | AAAGGTTATGGCTGTAGTT | 1391 | AACTACAGCCATAACCTTT |
| NC_045512.2_19mer_win1_13395 | 13395 | 13413 | 189 | AAGGTTATGGCTGTAGTTG | 1392 | CAACTACAGCCATAACCTT |
| NC_045512.2_19mer_win1_13396 | 13396 | 13414 | 190 | AGGTTATGGCTGTAGTTGT | 1393 | ACAACTACAGCCATAACCT |
| NC_045512.2_19mer_win1_13397 | 13397 | 13415 | 191 | GGTTATGGCTGTAGTTGTG | 1394 | CACAACTACAGCCATAACC |
| NC_045512.2_19mer_win1_13398 | 13398 | 13416 | 192 | GTTATGGCTGTAGTTGTGA | 1395 | TCACAACTACAGCCATAAC |
| NC_045512.2_19mer_win1_13458 | 13458 | 13476 | 193 | CGTTTTTAAACGGGTTTGC | 1396 | GCAAACCCGTTTAAAAACG |
| NC_045512.2_19mer_win1_13459 | 13459 | 13477 | 194 | GTTTTTAAACGGGTTTGCG | 1397 | CGCAAACCCGTTTAAAAAC |
| NC_045512.2_19mer_win1_13460 | 13460 | 13478 | 195 | TTTTTAAACGGGTTTGCGG | 1398 | CCGCAAACCCGTTTAAAAA |
| NC_045512.2_19mer_win1_13461 | 13461 | 13479 | 196 | TTTTAAACGGGTTTGCGGT | 1399 | ACCGCAAACCCGTTTAAAA |
| NC_045512.2_19mer_win1_13462 | 13462 | 13480 | 197 | TTTAAACGGGTTTGCGGTG | 1400 | CACCGCAAACCCGTTTAAA |
| NC_045512.2_19mer_win1_13463 | 13463 | 13481 | 198 | TTAAACGGGTTTGCGGTGT | 1401 | ACACCGCAAACCCGTTTAA |
| NC_045512.2_19mer_win1_13464 | 13464 | 13482 | 199 | TAAACGGGTTTGCGGTGTA | 1402 | TACACCGCAAACCCGTTTA |
| NC_045512.2_19mer_win1_13465 | 13465 | 13483 | 200 | AAACGGGTTTGCGGTGTAA | 1403 | TTACACCGCAAACCCGTTT |
| NC_045512.2_19mer_win1_13466 | 13466 | 13484 | 201 | AACGGGTTTGCGGTGTAAG | 1404 | CTTACACCGCAAACCCGTT |
| NC_045512.2_19mer_win1_13467 | 13467 | 13485 | 202 | ACGGGTTTGCGGTGTAAGT | 1405 | ACTTACACCGCAAACCCGT |
| NC_045512.2_19mer_win1_13468 | 13468 | 13486 | 203 | CGGGTTTGCGGTGTAAGTG | 1406 | CACTTACACCGCAAACCCG |
| NC_045512.2_19mer_win1_13469 | 13469 | 13487 | 204 | GGGTTTGCGGTGTAAGTGC | 1407 | GCACTTACACCGCAAACCC |
| NC_045512.2_19mer_win1_13470 | 13470 | 13488 | 205 | GGTTTGCGGTGTAAGTGCA | 1408 | TGCACTTACACCGCAAACC |
| NC_045512.2_19mer_win1_13471 | 13471 | 13489 | 206 | GTTTGCGGTGTAAGTGCAG | 1409 | CTGCACTTACACCGCAAAC |
| NC_045512.2_19mer_win1_13472 | 13472 | 13490 | 207 | TTTGCGGTGTAAGTGCAGC | 1410 | GCTGCACTTACACCGCAAA |
| NC_045512.2_19mer_win1_13473 | 13473 | 13491 | 208 | TTGCGGTGTAAGTGCAGCC | 1411 | GGCTGCACTTACACCGCAA |
| NC_045512.2_19mer_win1_13474 | 13474 | 13492 | 209 | TGCGGTGTAAGTGCAGCCC | 1412 | GGGCTGCACTTACACCGCA |
| NC_045512.2_19mer_win1_13475 | 13475 | 13493 | 210 | GCGGTGTAAGTGCAGCCCG | 1413 | CGGGCTGCACTTACACCGC |
| NC_045512.2_19mer_win1_13476 | 13476 | 13494 | 211 | CGGTGTAAGTGCAGCCCGT | 1414 | ACGGGCTGCACTTACACCG |
| NC_045512.2_19mer_win1_13477 | 13477 | 13495 | 212 | GGTGTAAGTGCAGCCCGTC | 1415 | GACGGGCTGCACTTACACC |
| NC_045512.2_19mer_win1_13478 | 13478 | 13496 | 213 | GTGTAAGTGCAGCCCGTCT | 1416 | AGACGGGCTGCACTTACAC |
| NC_045512.2_19mer_win1_13479 | 13479 | 13497 | 214 | TGTAAGTGCAGCCCGTCTT | 1417 | AAGACGGGCTGCACTTACA |
| NC_045512.2_19mer_win1_13480 | 13480 | 13498 | 215 | GTAAGTGCAGCCCGTCTTA | 1418 | TAAGACGGGCTGCACTTAC |
| NC_045512.2_19mer_win1_13481 | 13481 | 13499 | 216 | TAAGTGCAGCCCGTCTTAC | 1419 | GTAAGACGGGCTGCACTTA |
| NC_045512.2_19mer_win1_13482 | 13482 | 13500 | 217 | AAGTGCAGCCCGTCTTACA | 1420 | TGTAAGACGGGCTGCACTT |
| NC_045512.2_19mer_win1_13483 | 13483 | 13501 | 218 | AGTGCAGCCCGTCTTACAC | 1421 | GTGTAAGACGGGCTGCACT |
| NC_045512.2_19mer_win1_13484 | 13484 | 13502 | 219 | GTGCAGCCCGTCTTACACC | 1422 | GGTGTAAGACGGGCTGCAC |
| NC_045512.2_19mer_win1_13485 | 13485 | 13503 | 220 | TGCAGCCCGTCTTACACCG | 1423 | CGGTGTAAGACGGGCTGCA |
| NC_045512.2_19mer_win1_13486 | 13486 | 13504 | 221 | GCAGCCCGTCTTACACCGT | 1424 | ACGGTGTAAGACGGGCTGC |
| NC_045512.2_19mer_win1_13487 | 13487 | 13505 | 222 | CAGCCCGTCTTACACCGTG | 1425 | CACGGTGTAAGACGGGCTG |
| NC_045512.2_19mer_win1_13488 | 13488 | 13506 | 223 | AGCCCGTCTTACACCGTGC | 1426 | GCACGGTGTAAGACGGGCT |
| NC_045512.2_19mer_win1_13489 | 13489 | 13507 | 224 | GCCCGTCTTACACCGTGCG | 1427 | CGCACGGTGTAAGACGGGC |
| NC_045512.2_19mer_win1_13490 | 13490 | 13508 | 225 | CCCGTCTTACACCGTGCGG | 1428 | CCGCACGGTGTAAGACGGG |
| NC_045512.2_19mer_win1_13491 | 13491 | 13509 | 226 | CCGTCTTACACCGTGCGGC | 1429 | GCCGCACGGTGTAAGACGG |
| NC_045512.2_19mer_win1_13492 | 13492 | 13510 | 227 | CGTCTTACACCGTGCGGCA | 1430 | TGCCGCACGGTGTAAGACG |
| NC_045512.2_19mer_win1_13493 | 13493 | 13511 | 228 | GTCTTACACCGTGCGGCAC | 1431 | GTGCCGCACGGTGTAAGAC |
| NC_045512.2_19mer_win1_13494 | 13494 | 13512 | 229 | TCTTACACCGTGCGGCACA | 1432 | TGTGCCGCACGGTGTAAGA |
| NC_045512.2_19mer_win1_13495 | 13495 | 13513 | 230 | CTTACACCGTGCGGCACAG | 1433 | CTGTGCCGCACGGTGTAAG |
| NC_045512.2_19mer_win1_13496 | 13496 | 13514 | 231 | TTACACCGTGCGGCACAGG | 1434 | CCTGTGCCGCACGGTGTAA |
| NC_045512.2_19mer_win1_13497 | 13497 | 13515 | 232 | TACACCGTGCGGCACAGGC | 1435 | GCCTGTGCCGCACGGTGTA |
| NC_045512.2_19mer_win1_13498 | 13498 | 13516 | 233 | ACACCGTGCGGCACAGGCA | 1436 | TGCCTGTGCCGCACGGTGT |
| NC_045512.2_19mer_win1_13499 | 13499 | 13517 | 234 | CACCGTGCGGCACAGGCAC | 1437 | GTGCCTGTGCCGCACGGTG |
| NC_045512.2_19mer_win1_13500 | 13500 | 13518 | 235 | ACCGTGCGGCACAGGCACT | 1438 | AGTGCCTGTGCCGCACGGT |
| NC_045512.2_19mer_win1_13501 | 13501 | 13519 | 236 | CCGTGCGGCACAGGCACTA | 1439 | TAGTGCCTGTGCCGCACGG |
| NC_045512.2_19mer_win1_13502 | 13502 | 13520 | 237 | CGTGCGGCACAGGCACTAG | 1440 | CTAGTGCCTGTGCCGCACG |
| NC_045512.2_19mer_win1_13762 | 13762 | 13780 | 238 | GGTGACATGGTACCACATA | 1441 | TATGTGGTACCATGTCACC |
| NC_045512.2_19mer_win1_13763 | 13763 | 13781 | 239 | GTGACATGGTACCACATAT | 1442 | ATATGTGGTACCATGTCAC |
| NC_045512.2_19mer_win1_13764 | 13764 | 13782 | 240 | TGACATGGTACCACATATA | 1443 | TATATGTGGTACCATGTCA |
| NC_045512.2_19mer_win1_13765 | 13765 | 13783 | 241 | GACATGGTACCACATATAT | 1444 | ATATATGTGGTACCATGTC |
| NC_045512.2_19mer_win1_13766 | 13766 | 13784 | 242 | ACATGGTACCACATATATC | 1445 | GATATATGTGGTACCATGT |
| NC_045512.2_19mer_win1_13767 | 13767 | 13785 | 243 | CATGGTACCACATATATCA | 1446 | TGATATATGTGGTACCATG |
| NC_045512.2_19mer_win1_13768 | 13768 | 13786 | 244 | ATGGTACCACATATATCAC | 1447 | GTGATATATGTGGTACCAT |
| NC_045512.2_19mer_win1_13769 | 13769 | 13787 | 245 | TGGTACCACATATATCACG | 1448 | CGTGATATATGTGGTACCA |
| NC_045512.2_19mer_win1_13770 | 13770 | 13788 | 246 | GGTACCACATATATCACGT | 1449 | ACGTGATATATGTGGTACC |
| NC_045512.2_19mer_win1_13771 | 13771 | 13789 | 247 | GTACCACATATATCACGTC | 1450 | GACGTGATATATGTGGTAC |
| NC_045512.2_19mer_win1_13772 | 13772 | 13790 | 248 | TACCACATATATCACGTCA | 1451 | TGACGTGATATATGTGGTA |
| NC_045512.2_19mer_win1_14290 | 14290 | 14308 | 249 | GACCGTTATTTTAAATATT | 1452 | AATATTTAAAATAACGGTC |
| NC_045512.2_19mer_win1_14291 | 14291 | 14309 | 250 | ACCGTTATTTTAAATATTG | 1453 | CAATATTTAAAATAACGGT |
| NC_045512.2_19mer_win1_14292 | 14292 | 14310 | 251 | CCGTTATTTTAAATATTGG | 1454 | CCAATATTTAAAATAACGG |
| NC_045512.2_19mer_win1_14293 | 14293 | 14311 | 252 | CGTTATTTTAAATATTGGG | 1455 | CCCAATATTTAAAATAACG |
| NC_045512.2_19mer_win1_14294 | 14294 | 14312 | 253 | GTTATTTTAAATATTGGGA | 1456 | TCCCAATATTTAAAATAAC |
| NC_045512.2_19mer_win1_14404 | 14404 | 14422 | 254 | CCACCTACAAGTTTTGGAC | 1457 | GTCCAAAACTTGTAGGTGG |
| NC_045512.2_19mer_win1_14405 | 14405 | 14423 | 255 | CACCTACAAGTTTTGGACC | 1458 | GGTCCAAAACTTGTAGGTG |
| NC_045512.2_19mer_win1_14406 | 14406 | 14424 | 256 | ACCTACAAGTTTTGGACCA | 1459 | TGGTCCAAAACTTGTAGGT |
| NC_045512.2_19mer_win1_14407 | 14407 | 14425 | 257 | CCTACAAGTTTTGGACCAC | 1460 | GTGGTCCAAAACTTGTAGG |
| NC_045512.2_19mer_win1_14408 | 14408 | 14426 | 258 | CTACAAGTTTTGGACCACT | 1461 | AGTGGTCCAAAACTTGTAG |
| NC_045512.2_19mer_win1_14409 | 14409 | 14427 | 259 | TACAAGTTTTGGACCACTA | 1462 | TAGTGGTCCAAAACTTGTA |
| NC_045512.2_19mer_win1_14410 | 14410 | 14428 | 260 | ACAAGTTTTGGACCACTAG | 1463 | CTAGTGGTCCAAAACTTGT |
| NC_045512.2_19mer_win1_14411 | 14411 | 14429 | 261 | CAAGTTTTGGACCACTAGT | 1464 | ACTAGTGGTCCAAAACTTG |
| NC_045512.2_19mer_win1_14500 | 14500 | 14518 | 262 | GTACATAATCAGGATGTAA | 1465 | TTACATCCTGATTATGTAC |
| NC_045512.2_19mer_win1_14501 | 14501 | 14519 | 263 | TACATAATCAGGATGTAAA | 1466 | TTTACATCCTGATTATGTA |
| NC_045512.2_19mer_win1_14502 | 14502 | 14520 | 264 | ACATAATCAGGATGTAAAC | 1467 | GTTTACATCCTGATTATGT |
| NC_045512.2_19mer_win1_14503 | 14503 | 14521 | 265 | CATAATCAGGATGTAAACT | 1468 | AGTTTACATCCTGATTATG |
| NC_045512.2_19mer_win1_14504 | 14504 | 14522 | 266 | ATAATCAGGATGTAAACTT | 1469 | AAGTTTACATCCTGATTAT |
| NC_045512.2_19mer_win1_14505 | 14505 | 14523 | 267 | TAATCAGGATGTAAACTTA | 1470 | TAAGTTTACATCCTGATTA |
| NC_045512.2_19mer_win1_14506 | 14506 | 14524 | 268 | AATCAGGATGTAAACTTAC | 1471 | GTAAGTTTACATCCTGATT |
| NC_045512.2_19mer_win1_14507 | 14507 | 14525 | 269 | ATCAGGATGTAAACTTACA | 1472 | TGTAAGTTTACATCCTGAT |
| NC_045512.2_19mer_win1_14508 | 14508 | 14526 | 270 | TCAGGATGTAAACTTACAT | 1473 | ATGTAAGTTTACATCCTGA |
| NC_045512.2_19mer_win1_14509 | 14509 | 14527 | 271 | CAGGATGTAAACTTACATA | 1474 | TATGTAAGTTTACATCCTG |
| NC_045512.2_19mer_win1_14510 | 14510 | 14528 | 272 | AGGATGTAAACTTACATAG | 1475 | CTATGTAAGTTTACATCCT |
| NC_045512.2_19mer_win1_14511 | 14511 | 14529 | 273 | GGATGTAAACTTACATAGC | 1476 | GCTATGTAAGTTTACATCC |
| NC_045512.2_19mer_win1_14512 | 14512 | 14530 | 274 | GATGTAAACTTACATAGCT | 1477 | AGCTATGTAAGTTTACATC |
| NC_045512.2_19mer_win1_14513 | 14513 | 14531 | 275 | ATGTAAACTTACATAGCTC | 1478 | GAGCTATGTAAGTTTACAT |
| NC_045512.2_19mer_win1_14623 | 14623 | 14641 | 276 | TGCTTTTCAGTAGCTGCAC | 1479 | GTGCAGCTACTGAAAAGCA |
| NC_045512.2_19mer_win1_14624 | 14624 | 14642 | 277 | GCTTTTCAGTAGCTGCACT | 1480 | AGTGCAGCTACTGAAAAGC |
| NC_045512.2_19mer_win1_14650 | 14650 | 14668 | 278 | AATGTTGCTTTTCAAACTG | 1481 | CAGTTTGAAAAGCAACATT |
| NC_045512.2_19mer_win1_14651 | 14651 | 14669 | 279 | ATGTTGCTTTTCAAACTGT | 1482 | ACAGTTTGAAAAGCAACAT |
| NC_045512.2_19mer_win1_14652 | 14652 | 14670 | 280 | TGTTGCTTTTCAAACTGTC | 1483 | GACAGTTTGAAAAGCAACA |
| NC_045512.2_19mer_win1_14653 | 14653 | 14671 | 281 | GTTGCTTTTCAAACTGTCA | 1484 | TGACAGTTTGAAAAGCAAC |
| NC_045512.2_19mer_win1_14654 | 14654 | 14672 | 282 | TTGCTTTTCAAACTGTCAA | 1485 | TTGACAGTTTGAAAAGCAA |
| NC_045512.2_19mer_win1_14655 | 14655 | 14673 | 283 | TGCTTTTCAAACTGTCAAA | 1486 | TTTGACAGTTTGAAAAGCA |
| NC_045512.2_19mer_win1_14656 | 14656 | 14674 | 284 | GCTTTTCAAACTGTCAAAC | 1487 | GTTTGACAGTTTGAAAAGC |
| NC_045512.2_19mer_win1_14657 | 14657 | 14675 | 285 | CTTTTCAAACTGTCAAACC | 1488 | GGTTTGACAGTTTGAAAAG |
| NC_045512.2_19mer_win1_14658 | 14658 | 14676 | 286 | TTTTCAAACTGTCAAACCC | 1489 | GGGTTTGACAGTTTGAAAA |
| NC_045512.2_19mer_win1_14659 | 14659 | 14677 | 287 | TTTCAAACTGTCAAACCCG | 1490 | CGGGTTTGACAGTTTGAAA |
| NC_045512.2_19mer_win1_14660 | 14660 | 14678 | 288 | TTCAAACTGTCAAACCCGG | 1491 | CCGGGTTTGACAGTTTGAA |
| NC_045512.2_19mer_win1_14661 | 14661 | 14679 | 289 | TCAAACTGTCAAACCCGGT | 1492 | ACCGGGTTTGACAGTTTGA |
| NC_045512.2_19mer_win1_14662 | 14662 | 14680 | 290 | CAAACTGTCAAACCCGGTA | 1493 | TACCGGGTTTGACAGTTTG |
| NC_045512.2_19mer_win1_14663 | 14663 | 14681 | 291 | AAACTGTCAAACCCGGTAA | 1494 | TTACCGGGTTTGACAGTTT |
| NC_045512.2_19mer_win1_14664 | 14664 | 14682 | 292 | AACTGTCAAACCCGGTAAT | 1495 | ATTACCGGGTTTGACAGTT |
| NC_045512.2_19mer_win1_14665 | 14665 | 14683 | 293 | ACTGTCAAACCCGGTAATT | 1496 | AATTACCGGGTTTGACAGT |
| NC_045512.2_19mer_win1_14666 | 14666 | 14684 | 294 | CTGTCAAACCCGGTAATTT | 1497 | AAATTACCGGGTTTGACAG |
| NC_045512.2_19mer_win1_14667 | 14667 | 14685 | 295 | TGTCAAACCCGGTAATTTT | 1498 | AAAATTACCGGGTTTGACA |
| NC_045512.2_19mer_win1_14668 | 14668 | 14686 | 296 | GTCAAACCCGGTAATTTTA | 1499 | TAAAATTACCGGGTTTGAC |
| NC_045512.2_19mer_win1_14669 | 14669 | 14687 | 297 | TCAAACCCGGTAATTTTAA | 1500 | TTAAAATTACCGGGTTTGA |
| NC_045512.2_19mer_win1_14698 | 14698 | 14716 | 298 | TATGACTTTGCTGTGTCTA | 1501 | TAGACACAGCAAAGTCATA |
| NC_045512.2_19mer_win1_14699 | 14699 | 14717 | 299 | ATGACTTTGCTGTGTCTAA | 1502 | TTAGACACAGCAAAGTCAT |
| NC_045512.2_19mer_win1_14722 | 14722 | 14740 | 300 | TTCTTTAAGGAAGGAAGTT | 1503 | AACTTCCTTCCTTAAAGAA |
| NC_045512.2_19mer_win1_14723 | 14723 | 14741 | 301 | TCTTTAAGGAAGGAAGTTC | 1504 | GAACTTCCTTCCTTAAAGA |
| NC_045512.2_19mer_win1_14724 | 14724 | 14742 | 302 | CTTTAAGGAAGGAAGTTCT | 1505 | AGAACTTCCTTCCTTAAAG |
| NC_045512.2_19mer_win1_14725 | 14725 | 14743 | 303 | TTTAAGGAAGGAAGTTCTG | 1506 | CAGAACTTCCTTCCTTAAA |
| NC_045512.2_19mer_win1_14726 | 14726 | 14744 | 304 | TTAAGGAAGGAAGTTCTGT | 1507 | ACAGAACTTCCTTCCTTAA |
| NC_045512.2_19mer_win1_14727 | 14727 | 14745 | 305 | TAAGGAAGGAAGTTCTGTT | 1508 | AACAGAACTTCCTTCCTTA |
| NC_045512.2_19mer_win1_14728 | 14728 | 14746 | 306 | AAGGAAGGAAGTTCTGTTG | 1509 | CAACAGAACTTCCTTCCTT |
| NC_045512.2_19mer_win1_14729 | 14729 | 14747 | 307 | AGGAAGGAAGTTCTGTTGA | 1510 | TCAACAGAACTTCCTTCCT |
| NC_045512.2_19mer_win1_14730 | 14730 | 14748 | 308 | GGAAGGAAGTTCTGTTGAA | 1511 | TTCAACAGAACTTCCTTCC |
| NC_045512.2_19mer_win1_14750 | 14750 | 14768 | 309 | TAAAACACTTCTTCTTTGC | 1512 | GCAAAGAAGAAGTGTTTTA |
| NC_045512.2_19mer_win1_14751 | 14751 | 14769 | 310 | AAAACACTTCTTCTTTGCT | 1513 | AGCAAAGAAGAAGTGTTTT |
| NC_045512.2_19mer_win1_14752 | 14752 | 14770 | 311 | AAACACTTCTTCTTTGCTC | 1514 | GAGCAAAGAAGAAGTGTTT |
| NC_045512.2_19mer_win1_14753 | 14753 | 14771 | 312 | AACACTTCTTCTTTGCTCA | 1515 | TGAGCAAAGAAGAAGTGTT |
| NC_045512.2_19mer_win1_14754 | 14754 | 14772 | 313 | ACACTTCTTCTTTGCTCAG | 1516 | CTGAGCAAAGAAGAAGTGT |
| NC_045512.2_19mer_win1_14755 | 14755 | 14773 | 314 | CACTTCTTCTTTGCTCAGG | 1517 | CCTGAGCAAAGAAGAAGTG |
| NC_045512.2_19mer_win1_14756 | 14756 | 14774 | 315 | ACTTCTTCTTTGCTCAGGA | 1518 | TCCTGAGCAAAGAAGAAGT |
| NC_045512.2_19mer_win1_14757 | 14757 | 14775 | 316 | CTTCTTCTTTGCTCAGGAT | 1519 | ATCCTGAGCAAAGAAGAAG |
| NC_045512.2_19mer_win1_14758 | 14758 | 14776 | 317 | TTCTTCTTTGCTCAGGATG | 1520 | CATCCTGAGCAAAGAAGAA |
| NC_045512.2_19mer_win1_14759 | 14759 | 14777 | 318 | TCTTCTTTGCTCAGGATGG | 1521 | CCATCCTGAGCAAAGAAGA |
| NC_045512.2_19mer_win1_14821 | 14821 | 14839 | 319 | CCAACAATGTGTGATATCA | 1522 | TGATATCACACATTGTTGG |
| NC_045512.2_19mer_win1_14822 | 14822 | 14840 | 320 | CAACAATGTGTGATATCAG | 1523 | CTGATATCACACATTGTTG |
| NC_045512.2_19mer_win1_14823 | 14823 | 14841 | 321 | AACAATGTGTGATATCAGA | 1524 | TCTGATATCACACATTGTT |
| NC_045512.2_19mer_win1_14824 | 14824 | 14842 | 322 | ACAATGTGTGATATCAGAC | 1525 | GTCTGATATCACACATTGT |
| NC_045512.2_19mer_win1_14825 | 14825 | 14843 | 323 | CAATGTGTGATATCAGACA | 1526 | TGTCTGATATCACACATTG |
| NC_045512.2_19mer_win1_14826 | 14826 | 14844 | 324 | AATGTGTGATATCAGACAA | 1527 | TTGTCTGATATCACACATT |
| NC_045512.2_19mer_win1_14827 | 14827 | 14845 | 325 | ATGTGTGATATCAGACAAC | 1528 | GTTGTCTGATATCACACAT |
| NC_045512.2_19mer_win1_14828 | 14828 | 14846 | 326 | TGTGTGATATCAGACAACT | 1529 | AGTTGTCTGATATCACACA |
| NC_045512.2_19mer_win1_14854 | 14854 | 14872 | 327 | GTAGTTGAAGTTGTTGATA | 1530 | TATCAACAACTTCAACTAC |
| NC_045512.2_19mer_win1_14855 | 14855 | 14873 | 328 | TAGTTGAAGTTGTTGATAA | 1531 | TTATCAACAACTTCAACTA |
| NC_045512.2_19mer_win1_14875 | 14875 | 14893 | 329 | TACTTTGATTGTTACGATG | 1532 | CATCGTAACAATCAAAGTA |
| NC_045512.2_19mer_win1_14876 | 14876 | 14894 | 330 | ACTTTGATTGTTACGATGG | 1533 | CCATCGTAACAATCAAAGT |
| NC_045512.2_19mer_win1_14877 | 14877 | 14895 | 331 | CTTTGATTGTTACGATGGT | 1534 | ACCATCGTAACAATCAAAG |
| NC_045512.2_19mer_win1_14878 | 14878 | 14896 | 332 | TTTGATTGTTACGATGGTG | 1535 | CACCATCGTAACAATCAAA |
| NC_045512.2_19mer_win1_14879 | 14879 | 14897 | 333 | TTGATTGTTACGATGGTGG | 1536 | CCACCATCGTAACAATCAA |
| NC_045512.2_19mer_win1_14880 | 14880 | 14898 | 334 | TGATTGTTACGATGGTGGC | 1537 | GCCACCATCGTAACAATCA |
| NC_045512.2_19mer_win1_14881 | 14881 | 14899 | 335 | GATTGTTACGATGGTGGCT | 1538 | AGCCACCATCGTAACAATC |
| NC_045512.2_19mer_win1_14882 | 14882 | 14900 | 336 | ATTGTTACGATGGTGGCTG | 1539 | CAGCCACCATCGTAACAAT |
| NC_045512.2_19mer_win1_14883 | 14883 | 14901 | 337 | TTGTTACGATGGTGGCTGT | 1540 | ACAGCCACCATCGTAACAA |
| NC_045512.2_19mer_win1_14884 | 14884 | 14902 | 338 | TGTTACGATGGTGGCTGTA | 1541 | TACAGCCACCATCGTAACA |
| NC_045512.2_19mer_win1_14885 | 14885 | 14903 | 339 | GTTACGATGGTGGCTGTAT | 1542 | ATACAGCCACCATCGTAAC |
| NC_045512.2_19mer_win1_14962 | 14962 | 14980 | 340 | AAATGGGGTAAGGCTAGAC | 1543 | GTCTAGCCTTACCCCATTT |
| NC_045512.2_19mer_win1_14963 | 14963 | 14981 | 341 | AATGGGGTAAGGCTAGACT | 1544 | AGTCTAGCCTTACCCCATT |
| NC_045512.2_19mer_win1_14964 | 14964 | 14982 | 342 | ATGGGGTAAGGCTAGACTT | 1545 | AAGTCTAGCCTTACCCCAT |
| NC_045512.2_19mer_win1_14965 | 14965 | 14983 | 343 | TGGGGTAAGGCTAGACTTT | 1546 | AAAGTCTAGCCTTACCCCA |
| NC_045512.2_19mer_win1_14966 | 14966 | 14984 | 344 | GGGGTAAGGCTAGACTTTA | 1547 | TAAAGTCTAGCCTTACCCC |
| NC_045512.2_19mer_win1_14967 | 14967 | 14985 | 345 | GGGTAAGGCTAGACTTTAT | 1548 | ATAAAGTCTAGCCTTACCC |
| NC_045512.2_19mer_win1_14968 | 14968 | 14986 | 346 | GGTAAGGCTAGACTTTATT | 1549 | AATAAAGTCTAGCCTTACC |
| NC_045512.2_19mer_win1_14969 | 14969 | 14987 | 347 | GTAAGGCTAGACTTTATTA | 1550 | TAATAAAGTCTAGCCTTAC |
| NC_045512.2_19mer_win1_14970 | 14970 | 14988 | 348 | TAAGGCTAGACTTTATTAT | 1551 | ATAATAAAGTCTAGCCTTA |
| NC_045512.2_19mer_win1_14971 | 14971 | 14989 | 349 | AAGGCTAGACTTTATTATG | 1552 | CATAATAAAGTCTAGCCTT |
| NC_045512.2_19mer_win1_14972 | 14972 | 14990 | 350 | AGGCTAGACTTTATTATGA | 1553 | TCATAATAAAGTCTAGCCT |
| NC_045512.2_19mer_win1_14992 | 14992 | 15010 | 351 | TCAATGAGTTATGAGGATC | 1554 | GATCCTCATAACTCATTGA |
| NC_045512.2_19mer_win1_14993 | 14993 | 15011 | 352 | CAATGAGTTATGAGGATCA | 1555 | TGATCCTCATAACTCATTG |
| NC_045512.2_19mer_win1_14994 | 14994 | 15012 | 353 | AATGAGTTATGAGGATCAA | 1556 | TTGATCCTCATAACTCATT |
| NC_045512.2_19mer_win1_14995 | 14995 | 15013 | 354 | ATGAGTTATGAGGATCAAG | 1557 | CTTGATCCTCATAACTCAT |
| NC_045512.2_19mer_win1_14996 | 14996 | 15014 | 355 | TGAGTTATGAGGATCAAGA | 1558 | TCTTGATCCTCATAACTCA |
| NC_045512.2_19mer_win1_14997 | 14997 | 15015 | 356 | GAGTTATGAGGATCAAGAT | 1559 | ATCTTGATCCTCATAACTC |
| NC_045512.2_19mer_win1_14998 | 14998 | 15016 | 357 | AGTTATGAGGATCAAGATG | 1560 | CATCTTGATCCTCATAACT |
| NC_045512.2_19mer_win1_14999 | 14999 | 15017 | 358 | GTTATGAGGATCAAGATGC | 1561 | GCATCTTGATCCTCATAAC |
| NC_045512.2_19mer_win1_15000 | 15000 | 15018 | 359 | TTATGAGGATCAAGATGCA | 1562 | TGCATCTTGATCCTCATAA |
| NC_045512.2_19mer_win1_15001 | 15001 | 15019 | 360 | TATGAGGATCAAGATGCAC | 1563 | GTGCATCTTGATCCTCATA |
| NC_045512.2_19mer_win1_15002 | 15002 | 15020 | 361 | ATGAGGATCAAGATGCACT | 1564 | AGTGCATCTTGATCCTCAT |
| NC_045512.2_19mer_win1_15055 | 15055 | 15073 | 362 | ATAACTCAAATGAATCTTA | 1565 | TAAGATTCATTTGAGTTAT |
| NC_045512.2_19mer_win1_15056 | 15056 | 15074 | 363 | TAACTCAAATGAATCTTAA | 1566 | TTAAGATTCATTTGAGTTA |
| NC_045512.2_19mer_win1_15057 | 15057 | 15075 | 364 | AACTCAAATGAATCTTAAG | 1567 | CTTAAGATTCATTTGAGTT |
| NC_045512.2_19mer_win1_15058 | 15058 | 15076 | 365 | ACTCAAATGAATCTTAAGT | 1568 | ACTTAAGATTCATTTGAGT |
| NC_045512.2_19mer_win1_15059 | 15059 | 15077 | 366 | CTCAAATGAATCTTAAGTA | 1569 | TACTTAAGATTCATTTGAG |
| NC_045512.2_19mer_win1_15060 | 15060 | 15078 | 367 | TCAAATGAATCTTAAGTAT | 1570 | ATACTTAAGATTCATTTGA |
| NC_045512.2_19mer_win1_15061 | 15061 | 15079 | 368 | CAAATGAATCTTAAGTATG | 1571 | CATACTTAAGATTCATTTG |
| NC_045512.2_19mer_win1_15062 | 15062 | 15080 | 369 | AAATGAATCTTAAGTATGC | 1572 | GCATACTTAAGATTCATTT |
| NC_045512.2_19mer_win1_15063 | 15063 | 15081 | 370 | AATGAATCTTAAGTATGCC | 1573 | GGCATACTTAAGATTCATT |
| NC_045512.2_19mer_win1_15064 | 15064 | 15082 | 371 | ATGAATCTTAAGTATGCCA | 1574 | TGGCATACTTAAGATTCAT |
| NC_045512.2_19mer_win1_15065 | 15065 | 15083 | 372 | TGAATCTTAAGTATGCCAT | 1575 | ATGGCATACTTAAGATTCA |
| NC_045512.2_19mer_win1_15066 | 15066 | 15084 | 373 | GAATCTTAAGTATGCCATT | 1576 | AATGGCATACTTAAGATTC |
| NC_045512.2_19mer_win1_15067 | 15067 | 15085 | 374 | AATCTTAAGTATGCCATTA | 1577 | TAATGGCATACTTAAGATT |
| NC_045512.2_19mer_win1_15068 | 15068 | 15086 | 375 | ATCTTAAGTATGCCATTAG | 1578 | CTAATGGCATACTTAAGAT |
| NC_045512.2_19mer_win1_15069 | 15069 | 15087 | 376 | TCTTAAGTATGCCATTAGT | 1579 | ACTAATGGCATACTTAAGA |
| NC_045512.2_19mer_win1_15070 | 15070 | 15088 | 377 | CTTAAGTATGCCATTAGTG | 1580 | CACTAATGGCATACTTAAG |
| NC_045512.2_19mer_win1_15071 | 15071 | 15089 | 378 | TTAAGTATGCCATTAGTGC | 1581 | GCACTAATGGCATACTTAA |
| NC_045512.2_19mer_win1_15072 | 15072 | 15090 | 379 | TAAGTATGCCATTAGTGCA | 1582 | TGCACTAATGGCATACTTA |
| NC_045512.2_19mer_win1_15073 | 15073 | 15091 | 380 | AAGTATGCCATTAGTGCAA | 1583 | TTGCACTAATGGCATACTT |
| NC_045512.2_19mer_win1_15074 | 15074 | 15092 | 381 | AGTATGCCATTAGTGCAAA | 1584 | TTTGCACTAATGGCATACT |
| NC_045512.2_19mer_win1_15075 | 15075 | 15093 | 382 | GTATGCCATTAGTGCAAAG | 1585 | CTTTGCACTAATGGCATAC |
| NC_045512.2_19mer_win1_15076 | 15076 | 15094 | 383 | TATGCCATTAGTGCAAAGA | 1586 | TCTTTGCACTAATGGCATA |
| NC_045512.2_19mer_win1_15077 | 15077 | 15095 | 384 | ATGCCATTAGTGCAAAGAA | 1587 | TTCTTTGCACTAATGGCAT |
| NC_045512.2_19mer_win1_15078 | 15078 | 15096 | 385 | TGCCATTAGTGCAAAGAAT | 1588 | ATTCTTTGCACTAATGGCA |
| NC_045512.2_19mer_win1_15079 | 15079 | 15097 | 386 | GCCATTAGTGCAAAGAATA | 1589 | TATTCTTTGCACTAATGGC |
| NC_045512.2_19mer_win1_15080 | 15080 | 15098 | 387 | CCATTAGTGCAAAGAATAG | 1590 | CTATTCTTTGCACTAATGG |
| NC_045512.2_19mer_win1_15081 | 15081 | 15099 | 388 | CATTAGTGCAAAGAATAGA | 1591 | TCTATTCTTTGCACTAATG |
| NC_045512.2_19mer_win1_15082 | 15082 | 15100 | 389 | ATTAGTGCAAAGAATAGAG | 1592 | CTCTATTCTTTGCACTAAT |
| NC_045512.2_19mer_win1_15083 | 15083 | 15101 | 390 | TTAGTGCAAAGAATAGAGC | 1593 | GCTCTATTCTTTGCACTAA |
| NC_045512.2_19mer_win1_15084 | 15084 | 15102 | 391 | TAGTGCAAAGAATAGAGCT | 1594 | AGCTCTATTCTTTGCACTA |
| NC_045512.2_19mer_win1_15085 | 15085 | 15103 | 392 | AGTGCAAAGAATAGAGCTC | 1595 | GAGCTCTATTCTTTGCACT |
| NC_045512.2_19mer_win1_15086 | 15086 | 15104 | 393 | GTGCAAAGAATAGAGCTCG | 1596 | CGAGCTCTATTCTTTGCAC |
| NC_045512.2_19mer_win1_15087 | 15087 | 15105 | 394 | TGCAAAGAATAGAGCTCGC | 1597 | GCGAGCTCTATTCTTTGCA |
| NC_045512.2_19mer_win1_15088 | 15088 | 15106 | 395 | GCAAAGAATAGAGCTCGCA | 1598 | TGCGAGCTCTATTCTTTGC |
| NC_045512.2_19mer_win1_15089 | 15089 | 15107 | 396 | CAAAGAATAGAGCTCGCAC | 1599 | GTGCGAGCTCTATTCTTTG |
| NC_045512.2_19mer_win1_15090 | 15090 | 15108 | 397 | AAAGAATAGAGCTCGCACC | 1600 | GGTGCGAGCTCTATTCTTT |
| NC_045512.2_19mer_win1_15091 | 15091 | 15109 | 398 | AAGAATAGAGCTCGCACCG | 1601 | CGGTGCGAGCTCTATTCTT |
| NC_045512.2_19mer_win1_15092 | 15092 | 15110 | 399 | AGAATAGAGCTCGCACCGT | 1602 | ACGGTGCGAGCTCTATTCT |
| NC_045512.2_19mer_win1_15093 | 15093 | 15111 | 400 | GAATAGAGCTCGCACCGTA | 1603 | TACGGTGCGAGCTCTATTC |
| NC_045512.2_19mer_win1_15094 | 15094 | 15112 | 401 | AATAGAGCTCGCACCGTAG | 1604 | CTACGGTGCGAGCTCTATT |
| NC_045512.2_19mer_win1_15095 | 15095 | 15113 | 402 | ATAGAGCTCGCACCGTAGC | 1605 | GCTACGGTGCGAGCTCTAT |
| NC_045512.2_19mer_win1_15096 | 15096 | 15114 | 403 | TAGAGCTCGCACCGTAGCT | 1606 | AGCTACGGTGCGAGCTCTA |
| NC_045512.2_19mer_win1_15097 | 15097 | 15115 | 404 | AGAGCTCGCACCGTAGCTG | 1607 | CAGCTACGGTGCGAGCTCT |
| NC_045512.2_19mer_win1_15098 | 15098 | 15116 | 405 | GAGCTCGCACCGTAGCTGG | 1608 | CCAGCTACGGTGCGAGCTC |
| NC_045512.2_19mer_win1_15099 | 15099 | 15117 | 406 | AGCTCGCACCGTAGCTGGT | 1609 | ACCAGCTACGGTGCGAGCT |
| NC_045512.2_19mer_win1_15100 | 15100 | 15118 | 407 | GCTCGCACCGTAGCTGGTG | 1610 | CACCAGCTACGGTGCGAGC |
| NC_045512.2_19mer_win1_15101 | 15101 | 15119 | 408 | CTCGCACCGTAGCTGGTGT | 1611 | ACACCAGCTACGGTGCGAG |
| NC_045512.2_19mer_win1_15102 | 15102 | 15120 | 409 | TCGCACCGTAGCTGGTGTC | 1612 | GACACCAGCTACGGTGCGA |
| NC_045512.2_19mer_win1_15103 | 15103 | 15121 | 410 | CGCACCGTAGCTGGTGTCT | 1613 | AGACACCAGCTACGGTGCG |
| NC_045512.2_19mer_win1_15104 | 15104 | 15122 | 411 | GCACCGTAGCTGGTGTCTC | 1614 | GAGACACCAGCTACGGTGC |
| NC_045512.2_19mer_win1_15105 | 15105 | 15123 | 412 | CACCGTAGCTGGTGTCTCT | 1615 | AGAGACACCAGCTACGGTG |
| NC_045512.2_19mer_win1_15106 | 15106 | 15124 | 413 | ACCGTAGCTGGTGTCTCTA | 1616 | TAGAGACACCAGCTACGGT |
| NC_045512.2_19mer_win1_15107 | 15107 | 15125 | 414 | CCGTAGCTGGTGTCTCTAT | 1617 | ATAGAGACACCAGCTACGG |
| NC_045512.2_19mer_win1_15108 | 15108 | 15126 | 415 | CGTAGCTGGTGTCTCTATC | 1618 | GATAGAGACACCAGCTACG |
| NC_045512.2_19mer_win1_15109 | 15109 | 15127 | 416 | GTAGCTGGTGTCTCTATCT | 1619 | AGATAGAGACACCAGCTAC |
| NC_045512.2_19mer_win1_15110 | 15110 | 15128 | 417 | TAGCTGGTGTCTCTATCTG | 1620 | CAGATAGAGACACCAGCTA |
| NC_045512.2_19mer_win1_15111 | 15111 | 15129 | 418 | AGCTGGTGTCTCTATCTGT | 1621 | ACAGATAGAGACACCAGCT |
| NC_045512.2_19mer_win1_15112 | 15112 | 15130 | 419 | GCTGGTGTCTCTATCTGTA | 1622 | TACAGATAGAGACACCAGC |
| NC_045512.2_19mer_win1_15113 | 15113 | 15131 | 420 | CTGGTGTCTCTATCTGTAG | 1623 | CTACAGATAGAGACACCAG |
| NC_045512.2_19mer_win1_15114 | 15114 | 15132 | 421 | TGGTGTCTCTATCTGTAGT | 1624 | ACTACAGATAGAGACACCA |
| NC_045512.2_19mer_win1_15115 | 15115 | 15133 | 422 | GGTGTCTCTATCTGTAGTA | 1625 | TACTACAGATAGAGACACC |
| NC_045512.2_19mer_win1_15116 | 15116 | 15134 | 423 | GTGTCTCTATCTGTAGTAC | 1626 | GTACTACAGATAGAGACAC |
| NC_045512.2_19mer_win1_15117 | 15117 | 15135 | 424 | TGTCTCTATCTGTAGTACT | 1627 | AGTACTACAGATAGAGACA |
| NC_045512.2_19mer_win1_15118 | 15118 | 15136 | 425 | GTCTCTATCTGTAGTACTA | 1628 | TAGTACTACAGATAGAGAC |
| NC_045512.2_19mer_win1_15119 | 15119 | 15137 | 426 | TCTCTATCTGTAGTACTAT | 1629 | ATAGTACTACAGATAGAGA |
| NC_045512.2_19mer_win1_15120 | 15120 | 15138 | 427 | CTCTATCTGTAGTACTATG | 1630 | CATAGTACTACAGATAGAG |
| NC_045512.2_19mer_win1_15121 | 15121 | 15139 | 428 | TCTATCTGTAGTACTATGA | 1631 | TCATAGTACTACAGATAGA |
| NC_045512.2_19mer_win1_15122 | 15122 | 15140 | 429 | CTATCTGTAGTACTATGAC | 1632 | GTCATAGTACTACAGATAG |
| NC_045512.2_19mer_win1_15172 | 15172 | 15190 | 430 | TCAATAGCCGCCACTAGAG | 1633 | CTCTAGTGGCGGCTATTGA |
| NC_045512.2_19mer_win1_15173 | 15173 | 15191 | 431 | CAATAGCCGCCACTAGAGG | 1634 | CCTCTAGTGGCGGCTATTG |
| NC_045512.2_19mer_win1_15174 | 15174 | 15192 | 432 | AATAGCCGCCACTAGAGGA | 1635 | TCCTCTAGTGGCGGCTATT |
| NC_045512.2_19mer_win1_15175 | 15175 | 15193 | 433 | ATAGCCGCCACTAGAGGAG | 1636 | CTCCTCTAGTGGCGGCTAT |
| NC_045512.2_19mer_win1_15176 | 15176 | 15194 | 434 | TAGCCGCCACTAGAGGAGC | 1637 | GCTCCTCTAGTGGCGGCTA |
| NC_045512.2_19mer_win1_15177 | 15177 | 15195 | 435 | AGCCGCCACTAGAGGAGCT | 1638 | AGCTCCTCTAGTGGCGGCT |
| NC_045512.2_19mer_win1_15178 | 15178 | 15196 | 436 | GCCGCCACTAGAGGAGCTA | 1639 | TAGCTCCTCTAGTGGCGGC |
| NC_045512.2_19mer_win1_15179 | 15179 | 15197 | 437 | CCGCCACTAGAGGAGCTAC | 1640 | GTAGCTCCTCTAGTGGCGG |
| NC_045512.2_19mer_win1_15180 | 15180 | 15198 | 438 | CGCCACTAGAGGAGCTACT | 1641 | AGTAGCTCCTCTAGTGGCG |
| NC_045512.2_19mer_win1_15181 | 15181 | 15199 | 439 | GCCACTAGAGGAGCTACTG | 1642 | CAGTAGCTCCTCTAGTGGC |
| NC_045512.2_19mer_win1_15182 | 15182 | 15200 | 440 | CCACTAGAGGAGCTACTGT | 1643 | ACAGTAGCTCCTCTAGTGG |
| NC_045512.2_19mer_win1_15310 | 15310 | 15328 | 441 | AGAGCCATGCCTAACATGC | 1644 | GCATGTTAGGCATGGCTCT |
| NC_045512.2_19mer_win1_15311 | 15311 | 15329 | 442 | GAGCCATGCCTAACATGCT | 1645 | AGCATGTTAGGCATGGCTC |
| NC_045512.2_19mer_win1_15312 | 15312 | 15330 | 443 | AGCCATGCCTAACATGCTT | 1646 | AAGCATGTTAGGCATGGCT |
| NC_045512.2_19mer_win1_15313 | 15313 | 15331 | 444 | GCCATGCCTAACATGCTTA | 1647 | TAAGCATGTTAGGCATGGC |
| NC_045512.2_19mer_win1_15314 | 15314 | 15332 | 445 | CCATGCCTAACATGCTTAG | 1648 | CTAAGCATGTTAGGCATGG |
| NC_045512.2_19mer_win1_15346 | 15346 | 15364 | 446 | CTTGTTCTTGCTCGCAAAC | 1649 | GTTTGCGAGCAAGAACAAG |
| NC_045512.2_19mer_win1_15347 | 15347 | 15365 | 447 | TTGTTCTTGCTCGCAAACA | 1650 | TGTTTGCGAGCAAGAACAA |
| NC_045512.2_19mer_win1_15348 | 15348 | 15366 | 448 | TGTTCTTGCTCGCAAACAT | 1651 | ATGTTTGCGAGCAAGAACA |
| NC_045512.2_19mer_win1_15349 | 15349 | 15367 | 449 | GTTCTTGCTCGCAAACATA | 1652 | TATGTTTGCGAGCAAGAAC |
| NC_045512.2_19mer_win1_15496 | 15496 | 15514 | 450 | ACAACTGCTTATGCTAATA | 1653 | TATTAGCATAAGCAGTTGT |
| NC_045512.2_19mer_win1_15497 | 15497 | 15515 | 451 | CAACTGCTTATGCTAATAG | 1654 | CTATTAGCATAAGCAGTTG |
| NC_045512.2_19mer_win1_15498 | 15498 | 15516 | 452 | AACTGCTTATGCTAATAGT | 1655 | ACTATTAGCATAAGCAGTT |
| NC_045512.2_19mer_win1_15499 | 15499 | 15517 | 453 | ACTGCTTATGCTAATAGTG | 1656 | CACTATTAGCATAAGCAGT |
| NC_045512.2_19mer_win1_15500 | 15500 | 15518 | 454 | CTGCTTATGCTAATAGTGT | 1657 | ACACTATTAGCATAAGCAG |
| NC_045512.2_19mer_win1_15622 | 15622 | 15640 | 455 | TATGAGTGTCTCTATAGAA | 1658 | TTCTATAGAGACACTCATA |
| NC_045512.2_19mer_win1_15623 | 15623 | 15641 | 456 | ATGAGTGTCTCTATAGAAA | 1659 | TTTCTATAGAGACACTCAT |
| NC_045512.2_19mer_win1_15624 | 15624 | 15642 | 457 | TGAGTGTCTCTATAGAAAT | 1660 | ATTTCTATAGAGACACTCA |
| NC_045512.2_19mer_win1_15625 | 15625 | 15643 | 458 | GAGTGTCTCTATAGAAATA | 1661 | TATTTCTATAGAGACACTC |
| NC_045512.2_19mer_win1_15626 | 15626 | 15644 | 459 | AGTGTCTCTATAGAAATAG | 1662 | CTATTTCTATAGAGACACT |
| NC_045512.2_19mer_win1_15838 | 15838 | 15856 | 460 | TGGACTGAGACTGACCTTA | 1663 | TAAGGTCAGTCTCAGTCCA |
| NC_045512.2_19mer_win1_15839 | 15839 | 15857 | 461 | GGACTGAGACTGACCTTAC | 1664 | GTAAGGTCAGTCTCAGTCC |
| NC_045512.2_19mer_win1_15840 | 15840 | 15858 | 462 | GACTGAGACTGACCTTACT | 1665 | AGTAAGGTCAGTCTCAGTC |
| NC_045512.2_19mer_win1_15841 | 15841 | 15859 | 463 | ACTGAGACTGACCTTACTA | 1666 | TAGTAAGGTCAGTCTCAGT |
| NC_045512.2_19mer_win1_15842 | 15842 | 15860 | 464 | CTGAGACTGACCTTACTAA | 1667 | TTAGTAAGGTCAGTCTCAG |
| NC_045512.2_19mer_win1_15843 | 15843 | 15861 | 465 | TGAGACTGACCTTACTAAA | 1668 | TTTAGTAAGGTCAGTCTCA |
| NC_045512.2_19mer_win1_15844 | 15844 | 15862 | 466 | GAGACTGACCTTACTAAAG | 1669 | CTTTAGTAAGGTCAGTCTC |
| NC_045512.2_19mer_win1_15845 | 15845 | 15863 | 467 | AGACTGACCTTACTAAAGG | 1670 | CCTTTAGTAAGGTCAGTCT |
| NC_045512.2_19mer_win1_15846 | 15846 | 15864 | 468 | GACTGACCTTACTAAAGGA | 1671 | TCCTTTAGTAAGGTCAGTC |
| NC_045512.2_19mer_win1_15847 | 15847 | 15865 | 469 | ACTGACCTTACTAAAGGAC | 1672 | GTCCTTTAGTAAGGTCAGT |
| NC_045512.2_19mer_win1_15848 | 15848 | 15866 | 470 | CTGACCTTACTAAAGGACC | 1673 | GGTCCTTTAGTAAGGTCAG |
| NC_045512.2_19mer_win1_15849 | 15849 | 15867 | 471 | TGACCTTACTAAAGGACCT | 1674 | AGGTCCTTTAGTAAGGTCA |
| NC_045512.2_19mer_win1_15850 | 15850 | 15868 | 472 | GACCTTACTAAAGGACCTC | 1675 | GAGGTCCTTTAGTAAGGTC |
| NC_045512.2_19mer_win1_15851 | 15851 | 15869 | 473 | ACCTTACTAAAGGACCTCA | 1676 | TGAGGTCCTTTAGTAAGGT |
| NC_045512.2_19mer_win1_15886 | 15886 | 15904 | 474 | CATACAATGCTAGTTAAAC | 1677 | GTTTAACTAGCATTGTATG |
| NC_045512.2_19mer_win1_15887 | 15887 | 15905 | 475 | ATACAATGCTAGTTAAACA | 1678 | TGTTTAACTAGCATTGTAT |
| NC_045512.2_19mer_win1_15985 | 15985 | 16003 | 476 | AAAACAGATGGTACACTTA | 1679 | TAAGTGTACCATCTGTTTT |
| NC_045512.2_19mer_win1_15986 | 15986 | 16004 | 477 | AAACAGATGGTACACTTAT | 1680 | ATAAGTGTACCATCTGTTT |
| NC_045512.2_19mer_win1_15987 | 15987 | 16005 | 478 | AACAGATGGTACACTTATG | 1681 | CATAAGTGTACCATCTGTT |
| NC_045512.2_19mer_win1_15988 | 15988 | 16006 | 479 | ACAGATGGTACACTTATGA | 1682 | TCATAAGTGTACCATCTGT |
| NC_045512.2_19mer_win1_15989 | 15989 | 16007 | 480 | CAGATGGTACACTTATGAT | 1683 | ATCATAAGTGTACCATCTG |
| NC_045512.2_19mer_win1_15990 | 15990 | 16008 | 481 | AGATGGTACACTTATGATT | 1684 | AATCATAAGTGTACCATCT |
| NC_045512.2_19mer_win1_15991 | 15991 | 16009 | 482 | GATGGTACACTTATGATTG | 1685 | CAATCATAAGTGTACCATC |
| NC_045512.2_19mer_win1_15992 | 15992 | 16010 | 483 | ATGGTACACTTATGATTGA | 1686 | TCAATCATAAGTGTACCAT |
| NC_045512.2_19mer_win1_16057 | 16057 | 16075 | 484 | CCTAATCAGGAGTATGCTG | 1687 | CAGCATACTCCTGATTAGG |
| NC_045512.2_19mer_win1_16058 | 16058 | 16076 | 485 | CTAATCAGGAGTATGCTGA | 1688 | TCAGCATACTCCTGATTAG |
| NC_045512.2_19mer_win1_16059 | 16059 | 16077 | 486 | TAATCAGGAGTATGCTGAT | 1689 | ATCAGCATACTCCTGATTA |
| NC_045512.2_19mer_win1_16060 | 16060 | 16078 | 487 | AATCAGGAGTATGCTGATG | 1690 | CATCAGCATACTCCTGATT |
| NC_045512.2_19mer_win1_16061 | 16061 | 16079 | 488 | ATCAGGAGTATGCTGATGT | 1691 | ACATCAGCATACTCCTGAT |
| NC_045512.2_19mer_win1_16186 | 16186 | 16204 | 489 | TGGGAACCTGAGTTTTATG | 1692 | CATAAAACTCAGGTTCCCA |
| NC_045512.2_19mer_win1_16187 | 16187 | 16205 | 490 | GGGAACCTGAGTTTTATGA | 1693 | TCATAAAACTCAGGTTCCC |
| NC_045512.2_19mer_win1_16430 | 16430 | 16448 | 491 | TAGGAGGTATGAGCTATTA | 1694 | TAATAGCTCATACCTCCTA |
| NC_045512.2_19mer_win1_16822 | 16822 | 16840 | 492 | GGAGAGTACACCTTTGAAA | 1695 | TTTCAAAGGTGTACTCTCC |
| NC_045512.2_19mer_win1_16823 | 16823 | 16841 | 493 | GAGAGTACACCTTTGAAAA | 1696 | TTTTCAAAGGTGTACTCTC |
| NC_045512.2_19mer_win1_16824 | 16824 | 16842 | 494 | AGAGTACACCTTTGAAAAA | 1697 | TTTTTCAAAGGTGTACTCT |
| NC_045512.2_19mer_win1_16825 | 16825 | 16843 | 495 | GAGTACACCTTTGAAAAAG | 1698 | CTTTTTCAAAGGTGTACTC |
| NC_045512.2_19mer_win1_16826 | 16826 | 16844 | 496 | AGTACACCTTTGAAAAAGG | 1699 | CCTTTTTCAAAGGTGTACT |
| NC_045512.2_19mer_win1_16827 | 16827 | 16845 | 497 | GTACACCTTTGAAAAAGGT | 1700 | ACCTTTTTCAAAGGTGTAC |
| NC_045512.2_19mer_win1_16828 | 16828 | 16846 | 498 | TACACCTTTGAAAAAGGTG | 1701 | CACCTTTTTCAAAGGTGTA |
| NC_045512.2_19mer_win1_16829 | 16829 | 16847 | 499 | ACACCTTTGAAAAAGGTGA | 1702 | TCACCTTTTTCAAAGGTGT |
| NC_045512.2_19mer_win1_16830 | 16830 | 16848 | 500 | CACCTTTGAAAAAGGTGAC | 1703 | GTCACCTTTTTCAAAGGTG |
| NC_045512.2_19mer_win1_16831 | 16831 | 16849 | 501 | ACCTTTGAAAAAGGTGACT | 1704 | AGTCACCTTTTTCAAAGGT |
| NC_045512.2_19mer_win1_16832 | 16832 | 16850 | 502 | CCTTTGAAAAAGGTGACTA | 1705 | TAGTCACCTTTTTCAAAGG |
| NC_045512.2_19mer_win1_16833 | 16833 | 16851 | 503 | CTTTGAAAAAGGTGACTAT | 1706 | ATAGTCACCTTTTTCAAAG |
| NC_045512.2_19mer_win1_16834 | 16834 | 16852 | 504 | TTTGAAAAAGGTGACTATG | 1707 | CATAGTCACCTTTTTCAAA |
| NC_045512.2_19mer_win1_16835 | 16835 | 16853 | 505 | TTGAAAAAGGTGACTATGG | 1708 | CCATAGTCACCTTTTTCAA |
| NC_045512.2_19mer_win1_16836 | 16836 | 16854 | 506 | TGAAAAAGGTGACTATGGT | 1709 | ACCATAGTCACCTTTTTCA |
| NC_045512.2_19mer_win1_16837 | 16837 | 16855 | 507 | GAAAAAGGTGACTATGGTG | 1710 | CACCATAGTCACCTTTTTC |
| NC_045512.2_19mer_win1_16838 | 16838 | 16856 | 508 | AAAAAGGTGACTATGGTGA | 1711 | TCACCATAGTCACCTTTTT |
| NC_045512.2_19mer_win1_16839 | 16839 | 16857 | 509 | AAAAGGTGACTATGGTGAT | 1712 | ATCACCATAGTCACCTTTT |
| NC_045512.2_19mer_win1_16840 | 16840 | 16858 | 510 | AAAGGTGACTATGGTGATG | 1713 | CATCACCATAGTCACCTTT |
| NC_045512.2_19mer_win1_16841 | 16841 | 16859 | 511 | AAGGTGACTATGGTGATGC | 1714 | GCATCACCATAGTCACCTT |
| NC_045512.2_19mer_win1_16842 | 16842 | 16860 | 512 | AGGTGACTATGGTGATGCT | 1715 | AGCATCACCATAGTCACCT |
| NC_045512.2_19mer_win1_16843 | 16843 | 16861 | 513 | GGTGACTATGGTGATGCTG | 1716 | CAGCATCACCATAGTCACC |
| NC_045512.2_19mer_win1_16844 | 16844 | 16862 | 514 | GTGACTATGGTGATGCTGT | 1717 | ACAGCATCACCATAGTCAC |
| NC_045512.2_19mer_win1_16845 | 16845 | 16863 | 515 | TGACTATGGTGATGCTGTT | 1718 | AACAGCATCACCATAGTCA |
| NC_045512.2_19mer_win1_16846 | 16846 | 16864 | 516 | GACTATGGTGATGCTGTTG | 1719 | CAACAGCATCACCATAGTC |
| NC_045512.2_19mer_win1_16847 | 16847 | 16865 | 517 | ACTATGGTGATGCTGTTGT | 1720 | ACAACAGCATCACCATAGT |
| NC_045512.2_19mer_win1_16954 | 16954 | 16972 | 518 | CTAGTGCCACAAGAGCACT | 1721 | AGTGCTCTTGTGGCACTAG |
| NC_045512.2_19mer_win1_16955 | 16955 | 16973 | 519 | TAGTGCCACAAGAGCACTA | 1722 | TAGTGCTCTTGTGGCACTA |
| NC_045512.2_19mer_win1_16956 | 16956 | 16974 | 520 | AGTGCCACAAGAGCACTAT | 1723 | ATAGTGCTCTTGTGGCACT |
| NC_045512.2_19mer_win1_16957 | 16957 | 16975 | 521 | GTGCCACAAGAGCACTATG | 1724 | CATAGTGCTCTTGTGGCAC |
| NC_045512.2_19mer_win1_16958 | 16958 | 16976 | 522 | TGCCACAAGAGCACTATGT | 1725 | ACATAGTGCTCTTGTGGCA |
| NC_045512.2_19mer_win1_17008 | 17008 | 17026 | 523 | ATCTCAGATGAGTTTTCTA | 1726 | TAGAAAACTCATCTGAGAT |
| NC_045512.2_19mer_win1_17009 | 17009 | 17027 | 524 | TCTCAGATGAGTTTTCTAG | 1727 | CTAGAAAACTCATCTGAGA |
| NC_045512.2_19mer_win1_17010 | 17010 | 17028 | 525 | CTCAGATGAGTTTTCTAGC | 1728 | GCTAGAAAACTCATCTGAG |
| NC_045512.2_19mer_win1_17011 | 17011 | 17029 | 526 | TCAGATGAGTTTTCTAGCA | 1729 | TGCTAGAAAACTCATCTGA |
| NC_045512.2_19mer_win1_17012 | 17012 | 17030 | 527 | CAGATGAGTTTTCTAGCAA | 1730 | TTGCTAGAAAACTCATCTG |
| NC_045512.2_19mer_win1_17013 | 17013 | 17031 | 528 | AGATGAGTTTTCTAGCAAT | 1731 | ATTGCTAGAAAACTCATCT |
| NC_045512.2_19mer_win1_17014 | 17014 | 17032 | 529 | GATGAGTTTTCTAGCAATG | 1732 | CATTGCTAGAAAACTCATC |
| NC_045512.2_19mer_win1_17015 | 17015 | 17033 | 530 | ATGAGTTTTCTAGCAATGT | 1733 | ACATTGCTAGAAAACTCAT |
| NC_045512.2_19mer_win1_17016 | 17016 | 17034 | 531 | TGAGTTTTCTAGCAATGTT | 1734 | AACATTGCTAGAAAACTCA |
| NC_045512.2_19mer_win1_17017 | 17017 | 17035 | 532 | GAGTTTTCTAGCAATGTTG | 1735 | CAACATTGCTAGAAAACTC |
| NC_045512.2_19mer_win1_17018 | 17018 | 17036 | 533 | AGTTTTCTAGCAATGTTGC | 1736 | GCAACATTGCTAGAAAACT |
| NC_045512.2_19mer_win1_17019 | 17019 | 17037 | 534 | GTTTTCTAGCAATGTTGCA | 1737 | TGCAACATTGCTAGAAAAC |
| NC_045512.2_19mer_win1_17020 | 17020 | 17038 | 535 | TTTTCTAGCAATGTTGCAA | 1738 | TTGCAACATTGCTAGAAAA |
| NC_045512.2_19mer_win1_17021 | 17021 | 17039 | 536 | TTTCTAGCAATGTTGCAAA | 1739 | TTTGCAACATTGCTAGAAA |
| NC_045512.2_19mer_win1_17022 | 17022 | 17040 | 537 | TTCTAGCAATGTTGCAAAT | 1740 | ATTTGCAACATTGCTAGAA |
| NC_045512.2_19mer_win1_17023 | 17023 | 17041 | 538 | TCTAGCAATGTTGCAAATT | 1741 | AATTTGCAACATTGCTAGA |
| NC_045512.2_19mer_win1_17024 | 17024 | 17042 | 539 | CTAGCAATGTTGCAAATTA | 1742 | TAATTTGCAACATTGCTAG |
| NC_045512.2_19mer_win1_17080 | 17080 | 17098 | 540 | GGACCACCTGGTACTGGTA | 1743 | TACCAGTACCAGGTGGTCC |
| NC_045512.2_19mer_win1_17081 | 17081 | 17099 | 541 | GACCACCTGGTACTGGTAA | 1744 | TTACCAGTACCAGGTGGTC |
| NC_045512.2_19mer_win1_17082 | 17082 | 17100 | 542 | ACCACCTGGTACTGGTAAG | 1745 | CTTACCAGTACCAGGTGGT |
| NC_045512.2_19mer_win1_17083 | 17083 | 17101 | 543 | CCACCTGGTACTGGTAAGA | 1746 | TCTTACCAGTACCAGGTGG |
| NC_045512.2_19mer_win1_17084 | 17084 | 17102 | 544 | CACCTGGTACTGGTAAGAG | 1747 | CTCTTACCAGTACCAGGTG |
| NC_045512.2_19mer_win1_17085 | 17085 | 17103 | 545 | ACCTGGTACTGGTAAGAGT | 1748 | ACTCTTACCAGTACCAGGT |
| NC_045512.2_19mer_win1_17086 | 17086 | 17104 | 546 | CCTGGTACTGGTAAGAGTC | 1749 | GACTCTTACCAGTACCAGG |
| NC_045512.2_19mer_win1_17087 | 17087 | 17105 | 547 | CTGGTACTGGTAAGAGTCA | 1750 | TGACTCTTACCAGTACCAG |
| NC_045512.2_19mer_win1_17088 | 17088 | 17106 | 548 | TGGTACTGGTAAGAGTCAT | 1751 | ATGACTCTTACCAGTACCA |
| NC_045512.2_19mer_win1_17089 | 17089 | 17107 | 549 | GGTACTGGTAAGAGTCATT | 1752 | AATGACTCTTACCAGTACC |
| NC_045512.2_19mer_win1_17090 | 17090 | 17108 | 550 | GTACTGGTAAGAGTCATTT | 1753 | AAATGACTCTTACCAGTAC |
| NC_045512.2_19mer_win1_17091 | 17091 | 17109 | 551 | TACTGGTAAGAGTCATTTT | 1754 | AAAATGACTCTTACCAGTA |
| NC_045512.2_19mer_win1_17092 | 17092 | 17110 | 552 | ACTGGTAAGAGTCATTTTG | 1755 | CAAAATGACTCTTACCAGT |
| NC_045512.2_19mer_win1_17093 | 17093 | 17111 | 553 | CTGGTAAGAGTCATTTTGC | 1756 | GCAAAATGACTCTTACCAG |
| NC_045512.2_19mer_win1_17137 | 17137 | 17155 | 554 | TCTGCTCGCATAGTGTATA | 1757 | TATACACTATGCGAGCAGA |
| NC_045512.2_19mer_win1_17138 | 17138 | 17156 | 555 | CTGCTCGCATAGTGTATAC | 1758 | GTATACACTATGCGAGCAG |
| NC_045512.2_19mer_win1_17269 | 17269 | 17287 | 556 | AAATTCAAAGTGAATTCAA | 1759 | TTGAATTCACTTTGAATTT |
| NC_045512.2_19mer_win1_17270 | 17270 | 17288 | 557 | AATTCAAAGTGAATTCAAC | 1760 | GTTGAATTCACTTTGAATT |
| NC_045512.2_19mer_win1_17271 | 17271 | 17289 | 558 | ATTCAAAGTGAATTCAACA | 1761 | TGTTGAATTCACTTTGAAT |
| NC_045512.2_19mer_win1_17530 | 17530 | 17548 | 559 | ATAGGTCCAGACATGTTCC | 1762 | GGAACATGTCTGGACCTAT |
| NC_045512.2_19mer_win1_17531 | 17531 | 17549 | 560 | TAGGTCCAGACATGTTCCT | 1763 | AGGAACATGTCTGGACCTA |
| NC_045512.2_19mer_win1_17563 | 17563 | 17581 | 561 | CGTTGTCCTGCTGAAATTG | 1764 | CAATTTCAGCAGGACAACG |
| NC_045512.2_19mer_win1_17564 | 17564 | 17582 | 562 | GTTGTCCTGCTGAAATTGT | 1765 | ACAATTTCAGCAGGACAAC |
| NC_045512.2_19mer_win1_17680 | 17680 | 17698 | 563 | CATGATGTTTCATCTGCAA | 1766 | TTGCAGATGAAACATCATG |
| NC_045512.2_19mer_win1_17681 | 17681 | 17699 | 564 | ATGATGTTTCATCTGCAAT | 1767 | ATTGCAGATGAAACATCAT |
| NC_045512.2_19mer_win1_17746 | 17746 | 17764 | 565 | CCTGCTTGGAGAAAAGCTG | 1768 | CAGCTTTTCTCCAAGCAGG |
| NC_045512.2_19mer_win1_17747 | 17747 | 17765 | 566 | CTGCTTGGAGAAAAGCTGT | 1769 | ACAGCTTTTCTCCAAGCAG |
| NC_045512.2_19mer_win1_17857 | 17857 | 17875 | 567 | TATGACTATGTCATATTCA | 1770 | TGAATATGACATAGTCATA |
| NC_045512.2_19mer_win1_17858 | 17858 | 17876 | 568 | ATGACTATGTCATATTCAC | 1771 | GTGAATATGACATAGTCAT |
| NC_045512.2_19mer_win1_17956 | 17956 | 17974 | 569 | TGCATAATGTCTGATAGAG | 1772 | CTCTATCAGACATTATGCA |
| NC_045512.2_19mer_win1_17957 | 17957 | 17975 | 570 | GCATAATGTCTGATAGAGA | 1773 | TCTCTATCAGACATTATGC |
| NC_045512.2_19mer_win1_18100 | 18100 | 18118 | 571 | ACACAGGCACCTACACACC | 1774 | GGTGTGTAGGTGCCTGTGT |
| NC_045512.2_19mer_win1_18101 | 18101 | 18119 | 572 | CACAGGCACCTACACACCT | 1775 | AGGTGTGTAGGTGCCTGTG |
| NC_045512.2_19mer_win1_18102 | 18102 | 18120 | 573 | ACAGGCACCTACACACCTC | 1776 | GAGGTGTGTAGGTGCCTGT |
| NC_045512.2_19mer_win1_18103 | 18103 | 18121 | 574 | CAGGCACCTACACACCTCA | 1777 | TGAGGTGTGTAGGTGCCTG |
| NC_045512.2_19mer_win1_18104 | 18104 | 18122 | 575 | AGGCACCTACACACCTCAG | 1778 | CTGAGGTGTGTAGGTGCCT |
| NC_045512.2_19mer_win1_18196 | 18196 | 18214 | 576 | AGACTCATCTCTATGATGG | 1779 | CCATCATAGAGATGAGTCT |
| NC_045512.2_19mer_win1_18197 | 18197 | 18215 | 577 | GACTCATCTCTATGATGGG | 1780 | CCCATCATAGAGATGAGTC |
| NC_045512.2_19mer_win1_18198 | 18198 | 18216 | 578 | ACTCATCTCTATGATGGGT | 1781 | ACCCATCATAGAGATGAGT |
| NC_045512.2_19mer_win1_18199 | 18199 | 18217 | 579 | CTCATCTCTATGATGGGTT | 1782 | AACCCATCATAGAGATGAG |
| NC_045512.2_19mer_win1_18200 | 18200 | 18218 | 580 | TCATCTCTATGATGGGTTT | 1783 | AAACCCATCATAGAGATGA |
| NC_045512.2_19mer_win1_19618 | 19618 | 19636 | 581 | CAGAGTTTAGAAAATGTGG | 1784 | CCACATTTTCTAAACTCTG |
| NC_045512.2_19mer_win1_19619 | 19619 | 19637 | 582 | AGAGTTTAGAAAATGTGGC | 1785 | GCCACATTTTCTAAACTCT |
| NC_045512.2_19mer_win1_19620 | 19620 | 19638 | 583 | GAGTTTAGAAAATGTGGCT | 1786 | AGCCACATTTTCTAAACTC |
| NC_045512.2_19mer_win1_19621 | 19621 | 19639 | 584 | AGTTTAGAAAATGTGGCTT | 1787 | AAGCCACATTTTCTAAACT |
| NC_045512.2_19mer_win1_19783 | 19783 | 19801 | 585 | TTTGAGCTTTGGGCTAAGC | 1788 | GCTTAGCCCAAAGCTCAAA |
| NC_045512.2_19mer_win1_19784 | 19784 | 19802 | 586 | TTGAGCTTTGGGCTAAGCG | 1789 | CGCTTAGCCCAAAGCTCAA |
| NC_045512.2_19mer_win1_19831 | 19831 | 19849 | 587 | ATACTCAATAATTTGGGTG | 1790 | CACCCAAATTATTGAGTAT |
| NC_045512.2_19mer_win1_19832 | 19832 | 19850 | 588 | TACTCAATAATTTGGGTGT | 1791 | ACACCCAAATTATTGAGTA |
| NC_045512.2_19mer_win1_20107 | 20107 | 20125 | 589 | AATGGAGTCACATTAATTG | 1792 | CAATTAATGTGACTCCATT |
| NC_045512.2_19mer_win1_20108 | 20108 | 20126 | 590 | ATGGAGTCACATTAATTGG | 1793 | CCAATTAATGTGACTCCAT |
| NC_045512.2_19mer_win1_20109 | 20109 | 20127 | 591 | TGGAGTCACATTAATTGGA | 1794 | TCCAATTAATGTGACTCCA |
| NC_045512.2_19mer_win1_20110 | 20110 | 20128 | 592 | GGAGTCACATTAATTGGAG | 1795 | CTCCAATTAATGTGACTCC |
| NC_045512.2_19mer_win1_20111 | 20111 | 20129 | 593 | GAGTCACATTAATTGGAGA | 1796 | TCTCCAATTAATGTGACTC |
| NC_045512.2_19mer_win1_20112 | 20112 | 20130 | 594 | AGTCACATTAATTGGAGAA | 1797 | TTCTCCAATTAATGTGACT |
| NC_045512.2_19mer_win1_20776 | 20776 | 20794 | 595 | ATAATGATGAATGTCGCAA | 1798 | TTGCGACATTCATCATTAT |
| NC_045512.2_19mer_win1_20777 | 20777 | 20795 | 596 | TAATGATGAATGTCGCAAA | 1799 | TTTGCGACATTCATCATTA |
| NC_045512.2_19mer_win1_21502 | 21502 | 21520 | 597 | ATTAGAGAAAACAACAGAG | 1800 | CTCTGTTGTTTTCTCTAAT |
| NC_045512.2_19mer_win1_21503 | 21503 | 21521 | 598 | TTAGAGAAAACAACAGAGT | 1801 | ACTCTGTTGTTTTCTCTAA |
| NC_045512.2_19mer_win1_21504 | 21504 | 21522 | 599 | TAGAGAAAACAACAGAGTT | 1802 | AACTCTGTTGTTTTCTCTA |
| NC_045512.2_19mer_win1_21505 | 21505 | 21523 | 600 | AGAGAAAACAACAGAGTTG | 1803 | CAACTCTGTTGTTTTCTCT |
| NC_045512.2_19mer_win1_21506 | 21506 | 21524 | 601 | GAGAAAACAACAGAGTTGT | 1804 | ACAACTCTGTTGTTTTCTC |
| NC_045512.2_19mer_win1_24302 | 24302 | 24320 | 602 | AATGTTCTCTATGAGAACC | 1805 | GGTTCTCATAGAGAACATT |
| NC_045512.2_19mer_win1_24303 | 24303 | 24321 | 603 | ATGTTCTCTATGAGAACCA | 1806 | TGGTTCTCATAGAGAACAT |
| NC_045512.2_19mer_win1_24304 | 24304 | 24322 | 604 | TGTTCTCTATGAGAACCAA | 1807 | TTGGTTCTCATAGAGAACA |
| NC_045512.2_19mer_win1_24305 | 24305 | 24323 | 605 | GTTCTCTATGAGAACCAAA | 1808 | TTTGGTTCTCATAGAGAAC |
| NC_045512.2_19mer_win1_24306 | 24306 | 24324 | 606 | TTCTCTATGAGAACCAAAA | 1809 | TTTTGGTTCTCATAGAGAA |
| NC_045512.2_19mer_win1_24307 | 24307 | 24325 | 607 | TCTCTATGAGAACCAAAAA | 1810 | TTTTTGGTTCTCATAGAGA |
| NC_045512.2_19mer_win1_24446 | 24446 | 24464 | 608 | CTTGTTAAACAACTTAGCT | 1811 | AGCTAAGTTGTTTAACAAG |
| NC_045512.2_19mer_win1_24447 | 24447 | 24465 | 609 | TTGTTAAACAACTTAGCTC | 1812 | GAGCTAAGTTGTTTAACAA |
| NC_045512.2_19mer_win1_24620 | 24620 | 24638 | 610 | GCTTCTGCTAATCTTGCTG | 1813 | CAGCAAGATTAGCAGAAGC |
| NC_045512.2_19mer_win1_24621 | 24621 | 24639 | 611 | CTTCTGCTAATCTTGCTGC | 1814 | GCAGCAAGATTAGCAGAAG |
| NC_045512.2_19mer_win1_24622 | 24622 | 24640 | 612 | TTCTGCTAATCTTGCTGCT | 1815 | AGCAGCAAGATTAGCAGAA |
| NC_045512.2_19mer_win1_24623 | 24623 | 24641 | 613 | TCTGCTAATCTTGCTGCTA | 1816 | TAGCAGCAAGATTAGCAGA |
| NC_045512.2_19mer_win1_24624 | 24624 | 24642 | 614 | CTGCTAATCTTGCTGCTAC | 1817 | GTAGCAGCAAGATTAGCAG |
| NC_045512.2_19mer_win1_24625 | 24625 | 24643 | 615 | TGCTAATCTTGCTGCTACT | 1818 | AGTAGCAGCAAGATTAGCA |
| NC_045512.2_19mer_win1_24626 | 24626 | 24644 | 616 | GCTAATCTTGCTGCTACTA | 1819 | TAGTAGCAGCAAGATTAGC |
| NC_045512.2_19mer_win1_24627 | 24627 | 24645 | 617 | CTAATCTTGCTGCTACTAA | 1820 | TTAGTAGCAGCAAGATTAG |
| NC_045512.2_19mer_win1_24628 | 24628 | 24646 | 618 | TAATCTTGCTGCTACTAAA | 1821 | TTTAGTAGCAGCAAGATTA |
| NC_045512.2_19mer_win1_24629 | 24629 | 24647 | 619 | AATCTTGCTGCTACTAAAA | 1822 | TTTTAGTAGCAGCAAGATT |
| NC_045512.2_19mer_win1_24630 | 24630 | 24648 | 620 | ATCTTGCTGCTACTAAAAT | 1823 | ATTTTAGTAGCAGCAAGAT |
| NC_045512.2_19mer_win1_24631 | 24631 | 24649 | 621 | TCTTGCTGCTACTAAAATG | 1824 | CATTTTAGTAGCAGCAAGA |
| NC_045512.2_19mer_win1_24632 | 24632 | 24650 | 622 | CTTGCTGCTACTAAAATGT | 1825 | ACATTTTAGTAGCAGCAAG |
| NC_045512.2_19mer_win1_24633 | 24633 | 24651 | 623 | TTGCTGCTACTAAAATGTC | 1826 | GACATTTTAGTAGCAGCAA |
| NC_045512.2_19mer_win1_24662 | 24662 | 24680 | 624 | CTTGGACAATCAAAAAGAG | 1827 | CTCTTTTTGATTGTCCAAG |
| NC_045512.2_19mer_win1_24663 | 24663 | 24681 | 625 | TTGGACAATCAAAAAGAGT | 1828 | ACTCTTTTTGATTGTCCAA |
| NC_045512.2_19mer_win1_24664 | 24664 | 24682 | 626 | TGGACAATCAAAAAGAGTT | 1829 | AACTCTTTTTGATTGTCCA |
| NC_045512.2_19mer_win1_24665 | 24665 | 24683 | 627 | GGACAATCAAAAAGAGTTG | 1830 | CAACTCTTTTTGATTGTCC |
| NC_045512.2_19mer_win1_24666 | 24666 | 24684 | 628 | GACAATCAAAAAGAGTTGA | 1831 | TCAACTCTTTTTGATTGTC |
| NC_045512.2_19mer_win1_25034 | 25034 | 25052 | 629 | AATCATACATCACCAGATG | 1832 | CATCTGGTGATGTATGATT |
| NC_045512.2_19mer_win1_25035 | 25035 | 25053 | 630 | ATCATACATCACCAGATGT | 1833 | ACATCTGGTGATGTATGAT |
| NC_045512.2_19mer_win1_25038 | 25038 | 25056 | 633 | ATACATCACCAGATGTTGA | 1836 | TCAACATCTGGTGATGTAT |
| NC_045512.2_19mer_win1_25039 | 25039 | 25057 | 634 | TACATCACCAGATGTTGAT | 1837 | ATCAACATCTGGTGATGTA |
| NC_045512.2_19mer_win1_25104 | 25104 | 25122 | 635 | AAGAAATTGACCGCCTCAA | 1838 | TTGAGGCGGTCAATTTCTT |
| NC_045512.2_19mer_win1_25105 | 25105 | 25123 | 636 | AGAAATTGACCGCCTCAAT | 1839 | ATTGAGGCGGTCAATTTCT |
| NC_045512.2_19mer_win1_25106 | 25106 | 25124 | 637 | GAAATTGACCGCCTCAATG | 1840 | CATTGAGGCGGTCAATTTC |
| NC_045512.2_19mer_win1_25107 | 25107 | 25125 | 638 | AAATTGACCGCCTCAATGA | 1841 | TCATTGAGGCGGTCAATTT |
| NC_045512.2_19mer_win1_25108 | 25108 | 25126 | 639 | AATTGACCGCCTCAATGAG | 1842 | CTCATTGAGGCGGTCAATT |
| NC_045512.2_19mer_win1_25109 | 25109 | 25127 | 640 | ATTGACCGCCTCAATGAGG | 1843 | CCTCATTGAGGCGGTCAAT |
| NC_045512.2_19mer_win1_25110 | 25110 | 25128 | 641 | TTGACCGCCTCAATGAGGT | 1844 | ACCTCATTGAGGCGGTCAA |
| NC_045512.2_19mer_win1_25364 | 25364 | 25382 | 642 | GTCAAATTACATTACACAT | 1845 | ATGTGTAATGTAATTTGAC |
| NC_045512.2_19mer_win1_25365 | 25365 | 25383 | 643 | TCAAATTACATTACACATA | 1846 | TATGTGTAATGTAATTTGA |
| NC_045512.2_19mer_win1_25366 | 25366 | 25384 | 644 | CAAATTACATTACACATAA | 1847 | TTATGTGTAATGTAATTTG |
| NC_045512.2_19mer_win1_25367 | 25367 | 25385 | 645 | AAATTACATTACACATAAA | 1848 | TTTATGTGTAATGTAATTT |
| NC_045512.2_19mer_win1_25368 | 25368 | 25386 | 646 | AATTACATTACACATAAAC | 1849 | GTTTATGTGTAATGTAATT |
| NC_045512.2_19mer_win1_25369 | 25369 | 25387 | 647 | ATTACATTACACATAAACG | 1850 | CGTTTATGTGTAATGTAAT |
| NC_045512.2_19mer_win1_25502 | 25502 | 25520 | 648 | TACAAGCCTCACTCCCTTT | 1851 | AAAGGGAGTGAGGCTTGTA |
| NC_045512.2_19mer_win1_25503 | 25503 | 25521 | 649 | ACAAGCCTCACTCCCTTTC | 1852 | GAAAGGGAGTGAGGCTTGT |
| NC_045512.2_19mer_win1_25504 | 25504 | 25522 | 650 | CAAGCCTCACTCCCTTTCG | 1853 | CGAAAGGGAGTGAGGCTTG |
| NC_045512.2_19mer_win1_25505 | 25505 | 25523 | 651 | AAGCCTCACTCCCTTTCGG | 1854 | CCGAAAGGGAGTGAGGCTT |
| NC_045512.2_19mer_win1_25506 | 25506 | 25524 | 652 | AGCCTCACTCCCTTTCGGA | 1855 | TCCGAAAGGGAGTGAGGCT |
| NC_045512.2_19mer_win1_25507 | 25507 | 25525 | 653 | GCCTCACTCCCTTTCGGAT | 1856 | ATCCGAAAGGGAGTGAGGC |
| NC_045512.2_19mer_win1_25508 | 25508 | 25526 | 654 | CCTCACTCCCTTTCGGATG | 1857 | CATCCGAAAGGGAGTGAGG |
| NC_045512.2_19mer_win1_25509 | 25509 | 25527 | 655 | CTCACTCCCTTTCGGATGG | 1858 | CCATCCGAAAGGGAGTGAG |
| NC_045512.2_19mer_win1_25510 | 25510 | 25528 | 656 | TCACTCCCTTTCGGATGGC | 1859 | GCCATCCGAAAGGGAGTGA |
| NC_045512.2_19mer_win1_25511 | 25511 | 25529 | 657 | CACTCCCTTTCGGATGGCT | 1860 | AGCCATCCGAAAGGGAGTG |
| NC_045512.2_19mer_win1_25512 | 25512 | 25530 | 658 | ACTCCCTTTCGGATGGCTT | 1861 | AAGCCATCCGAAAGGGAGT |
| NC_045512.2_19mer_win1_26191 | 26191 | 26209 | 659 | CCGACGACGACTACTAGCG | 1862 | CGCTAGTAGTCGTCGTCGG |
| NC_045512.2_19mer_win1_26192 | 26192 | 26210 | 660 | CGACGACGACTACTAGCGT | 1863 | ACGCTAGTAGTCGTCGTCG |
| NC_045512.2_19mer_win1_26193 | 26193 | 26211 | 661 | GACGACGACTACTAGCGTG | 1864 | CACGCTAGTAGTCGTCGTC |
| NC_045512.2_19mer_win1_26194 | 26194 | 26212 | 662 | ACGACGACTACTAGCGTGC | 1865 | GCACGCTAGTAGTCGTCGT |
| NC_045512.2_19mer_win1_26195 | 26195 | 26213 | 663 | CGACGACTACTAGCGTGCC | 1866 | GGCACGCTAGTAGTCGTCG |
| NC_045512.2_19mer_win1_26196 | 26196 | 26214 | 664 | GACGACTACTAGCGTGCCT | 1867 | AGGCACGCTAGTAGTCGTC |
| NC_045512.2_19mer_win1_26197 | 26197 | 26215 | 665 | ACGACTACTAGCGTGCCTT | 1868 | AAGGCACGCTAGTAGTCGT |
| NC_045512.2_19mer_win1_26198 | 26198 | 26216 | 666 | CGACTACTAGCGTGCCTTT | 1869 | AAAGGCACGCTAGTAGTCG |
| NC_045512.2_19mer_win1_26199 | 26199 | 26217 | 667 | GACTACTAGCGTGCCTTTG | 1870 | CAAAGGCACGCTAGTAGTC |
| NC_045512.2_19mer_win1_26200 | 26200 | 26218 | 668 | ACTACTAGCGTGCCTTTGT | 1871 | ACAAAGGCACGCTAGTAGT |
| NC_045512.2_19mer_win1_26201 | 26201 | 26219 | 669 | CTACTAGCGTGCCTTTGTA | 1872 | TACAAAGGCACGCTAGTAG |
| NC_045512.2_19mer_win1_26202 | 26202 | 26220 | 670 | TACTAGCGTGCCTTTGTAA | 1873 | TTACAAAGGCACGCTAGTA |
| NC_045512.2_19mer_win1_26203 | 26203 | 26221 | 671 | ACTAGCGTGCCTTTGTAAG | 1874 | CTTACAAAGGCACGCTAGT |
| NC_045512.2_19mer_win1_26204 | 26204 | 26222 | 672 | CTAGCGTGCCTTTGTAAGC | 1875 | GCTTACAAAGGCACGCTAG |
| NC_045512.2_19mer_win1_26205 | 26205 | 26223 | 673 | TAGCGTGCCTTTGTAAGCA | 1876 | TGCTTACAAAGGCACGCTA |
| NC_045512.2_19mer_win1_26206 | 26206 | 26224 | 674 | AGCGTGCCTTTGTAAGCAC | 1877 | GTGCTTACAAAGGCACGCT |
| NC_045512.2_19mer_win1_26207 | 26207 | 26225 | 675 | GCGTGCCTTTGTAAGCACA | 1878 | TGTGCTTACAAAGGCACGC |
| NC_045512.2_19mer_win1_26208 | 26208 | 26226 | 676 | CGTGCCTTTGTAAGCACAA | 1879 | TTGTGCTTACAAAGGCACG |
| NC_045512.2_19mer_win1_26209 | 26209 | 26227 | 677 | GTGCCTTTGTAAGCACAAG | 1880 | CTTGTGCTTACAAAGGCAC |
| NC_045512.2_19mer_win1_26232 | 26232 | 26250 | 678 | TGAGTACGAACTTATGTAC | 1881 | GTACATAAGTTCGTACTCA |
| NC_045512.2_19mer_win1_26233 | 26233 | 26251 | 679 | GAGTACGAACTTATGTACT | 1882 | AGTACATAAGTTCGTACTC |
| NC_045512.2_19mer_win1_26234 | 26234 | 26252 | 680 | AGTACGAACTTATGTACTC | 1883 | GAGTACATAAGTTCGTACT |
| NC_045512.2_19mer_win1_26235 | 26235 | 26253 | 681 | GTACGAACTTATGTACTCA | 1884 | TGAGTACATAAGTTCGTAC |
| NC_045512.2_19mer_win1_26236 | 26236 | 26254 | 682 | TACGAACTTATGTACTCAT | 1885 | ATGAGTACATAAGTTCGTA |
| NC_045512.2_19mer_win1_26237 | 26237 | 26255 | 683 | ACGAACTTATGTACTCATT | 1886 | AATGAGTACATAAGTTCGT |
| NC_045512.2_19mer_win1_26238 | 26238 | 26256 | 684 | CGAACTTATGTACTCATTC | 1887 | GAATGAGTACATAAGTTCG |
| NC_045512.2_19mer_win1_26239 | 26239 | 26257 | 685 | GAACTTATGTACTCATTCG | 1888 | CGAATGAGTACATAAGTTC |
| NC_045512.2_19mer_win1_26240 | 26240 | 26258 | 686 | AACTTATGTACTCATTCGT | 1889 | ACGAATGAGTACATAAGTT |
| NC_045512.2_19mer_win1_26241 | 26241 | 26259 | 687 | ACTTATGTACTCATTCGTT | 1890 | AACGAATGAGTACATAAGT |
| NC_045512.2_19mer_win1_26242 | 26242 | 26260 | 688 | CTTATGTACTCATTCGTTT | 1891 | AAACGAATGAGTACATAAG |
| NC_045512.2_19mer_win1_26243 | 26243 | 26261 | 689 | TTATGTACTCATTCGTTTC | 1892 | GAAACGAATGAGTACATAA |
| NC_045512.2_19mer_win1_26244 | 26244 | 26262 | 690 | TATGTACTCATTCGTTTCG | 1893 | CGAAACGAATGAGTACATA |
| NC_045512.2_19mer_win1_26245 | 26245 | 26263 | 691 | ATGTACTCATTCGTTTCGG | 1894 | CCGAAACGAATGAGTACAT |
| NC_045512.2_19mer_win1_26246 | 26246 | 26264 | 692 | TGTACTCATTCGTTTCGGA | 1895 | TCCGAAACGAATGAGTACA |
| NC_045512.2_19mer_win1_26247 | 26247 | 26265 | 693 | GTACTCATTCGTTTCGGAA | 1896 | TTCCGAAACGAATGAGTAC |
| NC_045512.2_19mer_win1_26248 | 26248 | 26266 | 694 | TACTCATTCGTTTCGGAAG | 1897 | CTTCCGAAACGAATGAGTA |
| NC_045512.2_19mer_win1_26249 | 26249 | 26267 | 695 | ACTCATTCGTTTCGGAAGA | 1898 | TCTTCCGAAACGAATGAGT |
| NC_045512.2_19mer_win1_26269 | 26269 | 26287 | 696 | ACAGGTACGTTAATAGTTA | 1899 | TAACTATTAACGTACCTGT |
| NC_045512.2_19mer_win1_26270 | 26270 | 26288 | 697 | CAGGTACGTTAATAGTTAA | 1900 | TTAACTATTAACGTACCTG |
| NC_045512.2_19mer_win1_26271 | 26271 | 26289 | 698 | AGGTACGTTAATAGTTAAT | 1901 | ATTAACTATTAACGTACCT |
| NC_045512.2_19mer_win1_26272 | 26272 | 26290 | 699 | GGTACGTTAATAGTTAATA | 1902 | TATTAACTATTAACGTACC |
| NC_045512.2_19mer_win1_26273 | 26273 | 26291 | 700 | GTACGTTAATAGTTAATAG | 1903 | CTATTAACTATTAACGTAC |
| NC_045512.2_19mer_win1_26274 | 26274 | 26292 | 701 | TACGTTAATAGTTAATAGC | 1904 | GCTATTAACTATTAACGTA |
| NC_045512.2_19mer_win1_26275 | 26275 | 26293 | 702 | ACGTTAATAGTTAATAGCG | 1905 | CGCTATTAACTATTAACGT |
| NC_045512.2_19mer_win1_26276 | 26276 | 26294 | 703 | CGTTAATAGTTAATAGCGT | 1906 | ACGCTATTAACTATTAACG |
| NC_045512.2_19mer_win1_26277 | 26277 | 26295 | 704 | GTTAATAGTTAATAGCGTA | 1907 | TACGCTATTAACTATTAAC |
| NC_045512.2_19mer_win1_26278 | 26278 | 26296 | 705 | TTAATAGTTAATAGCGTAC | 1908 | GTACGCTATTAACTATTAA |
| NC_045512.2_19mer_win1_26279 | 26279 | 26297 | 706 | TAATAGTTAATAGCGTACT | 1909 | AGTACGCTATTAACTATTA |
| NC_045512.2_19mer_win1_26280 | 26280 | 26298 | 707 | AATAGTTAATAGCGTACTT | 1910 | AAGTACGCTATTAACTATT |
| NC_045512.2_19mer_win1_26281 | 26281 | 26299 | 708 | ATAGTTAATAGCGTACTTC | 1911 | GAAGTACGCTATTAACTAT |
| NC_045512.2_19mer_win1_26282 | 26282 | 26300 | 709 | TAGTTAATAGCGTACTTCT | 1912 | AGAAGTACGCTATTAACTA |
| NC_045512.2_19mer_win1_26283 | 26283 | 26301 | 710 | AGTTAATAGCGTACTTCTT | 1913 | AAGAAGTACGCTATTAACT |
| NC_045512.2_19mer_win1_26284 | 26284 | 26302 | 711 | GTTAATAGCGTACTTCTTT | 1914 | AAAGAAGTACGCTATTAAC |
| NC_045512.2_19mer_win1_26285 | 26285 | 26303 | 712 | TTAATAGCGTACTTCTTTT | 1915 | AAAAGAAGTACGCTATTAA |
| NC_045512.2_19mer_win1_26286 | 26286 | 26304 | 713 | TAATAGCGTACTTCTTTTT | 1916 | AAAAAGAAGTACGCTATTA |
| NC_045512.2_19mer_win1_26287 | 26287 | 26305 | 714 | AATAGCGTACTTCTTTTTC | 1917 | GAAAAAGAAGTACGCTATT |
| NC_045512.2_19mer_win1_26288 | 26288 | 26306 | 715 | ATAGCGTACTTCTTTTTCT | 1918 | AGAAAAAGAAGTACGCTAT |
| NC_045512.2_19mer_win1_26289 | 26289 | 26307 | 716 | TAGCGTACTTCTTTTTCTT | 1919 | AAGAAAAAGAAGTACGCTA |
| NC_045512.2_19mer_win1_26290 | 26290 | 26308 | 717 | AGCGTACTTCTTTTTCTTG | 1920 | CAAGAAAAAGAAGTACGCT |
| NC_045512.2_19mer_win1_26291 | 26291 | 26309 | 718 | GCGTACTTCTTTTTCTTGC | 1921 | GCAAGAAAAAGAAGTACGC |
| NC_045512.2_19mer_winl_26292 | 26292 | 26310 | 719 | CGTACTTCTTTTTCTTGCT | 1922 | AGCAAGAAAAAGAAGTACG |
| NC_045512.2_19mer_winl_26293 | 26293 | 26311 | 720 | GTACTTCTTTTTCTTGCTT | 1923 | AAGCAAGAAAAAGAAGTAC |
| NC_045512.2_19mer_winl_26294 | 26294 | 26312 | 721 | TACTTCTTTTTCTTGCTTT | 1924 | AAAGCAAGAAAAAGAAGTA |
| NC_045512.2_19mer_winl_26295 | 26295 | 26313 | 722 | ACTTCTTTTTCTTGCTTTC | 1925 | GAAAGCAAGAAAAAGAAGT |
| NC_045512.2_19mer_winl_26296 | 26296 | 26314 | 723 | CTTCTTTTTCTTGCTTTCG | 1926 | CGAAAGCAAGAAAAAGAAG |
| NC_045512.2_19mer_winl_26297 | 26297 | 26315 | 724 | TTCTTTTTCTTGCTTTCGT | 1927 | ACGAAAGCAAGAAAAAGAA |
| NC_045512.2_19mer_winl_26298 | 26298 | 26316 | 725 | TCTTTTTCTTGCTTTCGTG | 1928 | CACGAAAGCAAGAAAAAGA |
| NC_045512.2_19mer_winl_26299 | 26299 | 26317 | 726 | CTTTTTCTTGCTTTCGTGG | 1929 | CCACGAAAGCAAGAAAAAG |
| NC_045512.2_19mer_winl_26300 | 26300 | 26318 | 727 | TTTTTCTTGCTTTCGTGGT | 1930 | ACCACGAAAGCAAGAAAAA |
| NC_045512.2_19mer_winl_26301 | 26301 | 26319 | 728 | TTTTCTTGCTTTCGTGGTA | 1931 | TACCACGAAAGCAAGAAAA |
| NC_045512.2_19mer_winl_26302 | 26302 | 26320 | 729 | TTTCTTGCTTTCGTGGTAT | 1932 | ATACCACGAAAGCAAGAAA |
| NC_045512.2_19mer_winl_26303 | 26303 | 26321 | 730 | TTCTTGCTTTCGTGGTATT | 1933 | AATACCACGAAAGCAAGAA |
| NC_045512.2_19mer_winl_26304 | 26304 | 26322 | 731 | TCTTGCTTTCGTGGTATTC | 1934 | GAATACCACGAAAGCAAGA |
| NC_045512.2_19mer_winl_26305 | 26305 | 26323 | 732 | CTTGCTTTCGTGGTATTCT | 1935 | AGAATACCACGAAAGCAAG |
| NC_045512.2_19mer_winl_26306 | 26306 | 26324 | 733 | TTGCTTTCGTGGTATTCTT | 1936 | AAGAATACCACGAAAGCAA |
| NC_045512.2_19mer_winl_26307 | 26307 | 26325 | 734 | TGCTTTCGTGGTATTCTTG | 1937 | CAAGAATACCACGAAAGCA |
| NC_045512.2_19mer_winl_26308 | 26308 | 26326 | 735 | GCTTTCGTGGTATTCTTGC | 1938 | GCAAGAATACCACGAAAGC |
| NC_045512.2_19mer_winl_26309 | 26309 | 26327 | 736 | CTTTCGTGGTATTCTTGCT | 1939 | AGCAAGAATACCACGAAAG |
| NC_045512.2_19mer_winl_26310 | 26310 | 26328 | 737 | TTTCGTGGTATTCTTGCTA | 1940 | TAGCAAGAATACCACGAAA |
| NC_045512.2_19mer_winl_26311 | 26311 | 26329 | 738 | TTCGTGGTATTCTTGCTAG | 1941 | CTAGCAAGAATACCACGAA |
| NC_045512.2_19mer_win1_26312 | 26312 | 26330 | 739 | TCGTGGTATTCTTGCTAGT | 1942 | ACTAGCAAGAATACCACGA |
| NC_045512.2_19mer_win1_26332 | 26332 | 26350 | 740 | ACACTAGCCATCCTTACTG | 1943 | CAGTAAGGATGGCTAGTGT |
| NC_045512.2_19mer_win1_26333 | 26333 | 26351 | 741 | CACTAGCCATCCTTACTGC | 1944 | GCAGTAAGGATGGCTAGTG |
| NC_045512.2_19mer_win1_26334 | 26334 | 26352 | 742 | ACTAGCCATCCTTACTGCG | 1945 | CGCAGTAAGGATGGCTAGT |
| NC_045512.2_19mer_win1_26335 | 26335 | 26353 | 743 | CTAGCCATCCTTACTGCGC | 1946 | GCGCAGTAAGGATGGCTAG |
| NC_045512.2_19mer_win1_26336 | 26336 | 26354 | 744 | TAGCCATCCTTACTGCGCT | 1947 | AGCGCAGTAAGGATGGCTA |
| NC_045512.2_19mer_win1_26337 | 26337 | 26355 | 745 | AGCCATCCTTACTGCGCTT | 1948 | AAGCGCAGTAAGGATGGCT |
| NC_045512.2_19mer_win1_26338 | 26338 | 26356 | 746 | GCCATCCTTACTGCGCTTC | 1949 | GAAGCGCAGTAAGGATGGC |
| NC_045512.2_19mer_win1_26339 | 26339 | 26357 | 747 | CCATCCTTACTGCGCTTCG | 1950 | CGAAGCGCAGTAAGGATGG |
| NC_045512.2_19mer_win1_26340 | 26340 | 26358 | 748 | CATCCTTACTGCGCTTCGA | 1951 | TCGAAGCGCAGTAAGGATG |
| NC_045512.2_19mer_win1_26341 | 26341 | 26359 | 749 | ATCCTTACTGCGCTTCGAT | 1952 | ATCGAAGCGCAGTAAGGAT |
| NC_045512.2_19mer_win1_26342 | 26342 | 26360 | 750 | TCCTTACTGCGCTTCGATT | 1953 | AATCGAAGCGCAGTAAGGA |
| NC_045512.2_19mer_win1_26343 | 26343 | 26361 | 751 | CCTTACTGCGCTTCGATTG | 1954 | CAATCGAAGCGCAGTAAGG |
| NC_045512.2_19mer_win1_26344 | 26344 | 26362 | 752 | CTTACTGCGCTTCGATTGT | 1955 | ACAATCGAAGCGCAGTAAG |
| NC_045512.2_19mer_win1_26345 | 26345 | 26363 | 753 | TTACTGCGCTTCGATTGTG | 1956 | CACAATCGAAGCGCAGTAA |
| NC_045512.2_19mer_win1_26346 | 26346 | 26364 | 754 | TACTGCGCTTCGATTGTGT | 1957 | ACACAATCGAAGCGCAGTA |
| NC_045512.2_19mer_win1_26347 | 26347 | 26365 | 755 | ACTGCGCTTCGATTGTGTG | 1958 | CACACAATCGAAGCGCAGT |
| NC_045512.2_19mer_win1_26348 | 26348 | 26366 | 756 | CTGCGCTTCGATTGTGTGC | 1959 | GCACACAATCGAAGCGCAG |
| NC_045512.2_19mer_win1_26349 | 26349 | 26367 | 757 | TGCGCTTCGATTGTGTGCG | 1960 | CGCACACAATCGAAGCGCA |
| NC_045512.2_19mer_win1_26350 | 26350 | 26368 | 758 | GCGCTTCGATTGTGTGCGT | 1961 | ACGCACACAATCGAAGCGC |
| NC_045512.2_19mer_win1_26351 | 26351 | 26369 | 759 | CGCTTCGATTGTGTGCGTA | 1962 | TACGCACACAATCGAAGCG |
| NC_045512.2_19mer_win1_26352 | 26352 | 26370 | 760 | GCTTCGATTGTGTGCGTAC | 1963 | GTACGCACACAATCGAAGC |
| NC_045512.2_19mer_win1_26353 | 26353 | 26371 | 761 | CTTCGATTGTGTGCGTACT | 1964 | AGTACGCACACAATCGAAG |
| NC_045512.2_19mer_win1_26354 | 26354 | 26372 | 762 | TTCGATTGTGTGCGTACTG | 1965 | CAGTACGCACACAATCGAA |
| NC_045512.2_19mer_win1_26355 | 26355 | 26373 | 763 | TCGATTGTGTGCGTACTGC | 1966 | GCAGTACGCACACAATCGA |
| NC_045512.2_19mer_win1_26356 | 26356 | 26374 | 764 | CGATTGTGTGCGTACTGCT | 1967 | AGCAGTACGCACACAATCG |
| NC_045512.2_19mer_win1_26357 | 26357 | 26375 | 765 | GATTGTGTGCGTACTGCTG | 1968 | CAGCAGTACGCACACAATC |
| NC_045512.2_19mer_win1_26358 | 26358 | 26376 | 766 | ATTGTGTGCGTACTGCTGC | 1969 | GCAGCAGTACGCACACAAT |
| NC_045512.2_19mer_win1_26359 | 26359 | 26377 | 767 | TTGTGTGCGTACTGCTGCA | 1970 | TGCAGCAGTACGCACACAA |
| NC_045512.2_19mer_win1_26360 | 26360 | 26378 | 768 | TGTGTGCGTACTGCTGCAA | 1971 | TTGCAGCAGTACGCACACA |
| NC_045512.2_19mer_win1_26361 | 26361 | 26379 | 769 | GTGTGCGTACTGCTGCAAT | 1972 | ATTGCAGCAGTACGCACAC |
| NC_045512.2_19mer_win1_26362 | 26362 | 26380 | 770 | TGTGCGTACTGCTGCAATA | 1973 | TATTGCAGCAGTACGCACA |
| NC_045512.2_19mer_win1_26363 | 26363 | 26381 | 771 | GTGCGTACTGCTGCAATAT | 1974 | ATATTGCAGCAGTACGCAC |
| NC_045512.2_19mer_win1_26364 | 26364 | 26382 | 772 | TGCGTACTGCTGCAATATT | 1975 | AATATTGCAGCAGTACGCA |
| NC_045512.2_19mer_win1_26365 | 26365 | 26383 | 773 | GCGTACTGCTGCAATATTG | 1976 | CAATATTGCAGCAGTACGC |
| NC_045512.2_19mer_win1_26366 | 26366 | 26384 | 774 | CGTACTGCTGCAATATTGT | 1977 | ACAATATTGCAGCAGTACG |
| NC_045512.2_19mer_win1_26367 | 26367 | 26385 | 775 | GTACTGCTGCAATATTGTT | 1978 | AACAATATTGCAGCAGTAC |
| NC_045512.2_19mer_win1_26368 | 26368 | 26386 | 776 | TACTGCTGCAATATTGTTA | 1979 | TAACAATATTGCAGCAGTA |
| NC_045512.2_19mer_win1_26369 | 26369 | 26387 | 777 | ACTGCTGCAATATTGTTAA | 1980 | TTAACAATATTGCAGCAGT |
| NC_045512.2_19mer_win1_26370 | 26370 | 26388 | 778 | CTGCTGCAATATTGTTAAC | 1981 | GTTAACAATATTGCAGCAG |
| NC_045512.2_19mer_win1_26371 | 26371 | 26389 | 779 | TGCTGCAATATTGTTAACG | 1982 | CGTTAACAATATTGCAGCA |
| NC_045512.2_19mer_win1_26372 | 26372 | 26390 | 780 | GCTGCAATATTGTTAACGT | 1983 | ACGTTAACAATATTGCAGC |
| NC_045512.2_19mer_win1_26373 | 26373 | 26391 | 781 | CTGCAATATTGTTAACGTG | 1984 | CACGTTAACAATATTGCAG |
| NC_045512.2_19mer_win1_26374 | 26374 | 26392 | 782 | TGCAATATTGTTAACGTGA | 1985 | TCACGTTAACAATATTGCA |
| NC_045512.2_19mer_win1_26375 | 26375 | 26393 | 783 | GCAATATTGTTAACGTGAG | 1986 | CTCACGTTAACAATATTGC |
| NC_045512.2_19mer_win1_26376 | 26376 | 26394 | 784 | CAATATTGTTAACGTGAGT | 1987 | ACTCACGTTAACAATATTG |
| NC_045512.2_19mer_win1_26450 | 26450 | 26468 | 785 | GAGTTCCTGATCTTCTGGT | 1988 | ACCAGAAGATCAGGAACTC |
| NC_045512.2_19mer_win1_26451 | 26451 | 26469 | 786 | AGTTCCTGATCTTCTGGTC | 1989 | GACCAGAAGATCAGGAACT |
| NC_045512.2_19mer_win1_26452 | 26452 | 26470 | 787 | GTTCCTGATCTTCTGGTCT | 1990 | AGACCAGAAGATCAGGAAC |
| NC_045512.2_19mer_win1_26453 | 26453 | 26471 | 788 | TTCCTGATCTTCTGGTCTA | 1991 | TAGACCAGAAGATCAGGAA |
| NC_045512.2_19mer_win1_26454 | 26454 | 26472 | 789 | TCCTGATCTTCTGGTCTAA | 1992 | TTAGACCAGAAGATCAGGA |
| NC_045512.2_19mer_win1_26455 | 26455 | 26473 | 790 | CCTGATCTTCTGGTCTAAA | 1993 | TTTAGACCAGAAGATCAGG |
| NC_045512.2_19mer_win1_26456 | 26456 | 26474 | 791 | CTGATCTTCTGGTCTAAAC | 1994 | GTTTAGACCAGAAGATCAG |
| NC_045512.2_19mer_win1_26457 | 26457 | 26475 | 792 | TGATCTTCTGGTCTAAACG | 1995 | CGTTTAGACCAGAAGATCA |
| NC_045512.2_19mer_win1_26458 | 26458 | 26476 | 793 | GATCTTCTGGTCTAAACGA | 1996 | TCGTTTAGACCAGAAGATC |
| NC_045512.2_19mer_win1_26459 | 26459 | 26477 | 794 | ATCTTCTGGTCTAAACGAA | 1997 | TTCGTTTAGACCAGAAGAT |
| NC_045512.2_19mer_win1_26460 | 26460 | 26478 | 795 | TCTTCTGGTCTAAACGAAC | 1998 | GTTCGTTTAGACCAGAAGA |
| NC_045512.2_19mer_win1_26461 | 26461 | 26479 | 796 | CTTCTGGTCTAAACGAACT | 1999 | AGTTCGTTTAGACCAGAAG |
| NC_045512.2_19mer_win1_26462 | 26462 | 26480 | 797 | TTCTGGTCTAAACGAACTA | 2000 | TAGTTCGTTTAGACCAGAA |
| NC_045512.2_19mer_win1_26463 | 26463 | 26481 | 798 | TCTGGTCTAAACGAACTAA | 2001 | TTAGTTCGTTTAGACCAGA |
| NC_045512.2_19mer_win1_26574 | 26574 | 26592 | 799 | GAACAATGGAACCTAGTAA | 2002 | TTACTAGGTTCCATTGTTC |
| NC_045512.2_19mer_win1_26575 | 26575 | 26593 | 800 | AACAATGGAACCTAGTAAT | 2003 | ATTACTAGGTTCCATTGTT |
| NC_045512.2_19mer_win1_26576 | 26576 | 26594 | 801 | ACAATGGAACCTAGTAATA | 2004 | TATTACTAGGTTCCATTGT |
| NC_045512.2_19mer_win1_26577 | 26577 | 26595 | 802 | CAATGGAACCTAGTAATAG | 2005 | CTATTACTAGGTTCCATTG |
| NC_045512.2_19mer_win1_26578 | 26578 | 26596 | 803 | AATGGAACCTAGTAATAGG | 2006 | CCTATTACTAGGTTCCATT |
| NC_045512.2_19mer_win1_26579 | 26579 | 26597 | 804 | ATGGAACCTAGTAATAGGT | 2007 | ACCTATTACTAGGTTCCAT |
| NC_045512.2_19mer_win1_26580 | 26580 | 26598 | 805 | TGGAACCTAGTAATAGGTT | 2008 | AACCTATTACTAGGTTCCA |
| NC_045512.2_19mer_win1_26581 | 26581 | 26599 | 806 | GGAACCTAGTAATAGGTTT | 2009 | AAACCTATTACTAGGTTCC |
| NC_045512.2_19mer_win1_26582 | 26582 | 26600 | 807 | GAACCTAGTAATAGGTTTC | 2010 | GAAACCTATTACTAGGTTC |
| NC_045512.2_19mer_win1_27033 | 27033 | 27051 | 808 | GCTACATCACGAACGCTTT | 2011 | AAAGCGTTCGTGATGTAGC |
| NC_045512.2_19mer_win1_27034 | 27034 | 27052 | 809 | CTACATCACGAACGCTTTC | 2012 | GAAAGCGTTCGTGATGTAG |
| NC_045512.2_19mer_win1_27035 | 27035 | 27053 | 810 | TACATCACGAACGCTTTCT | 2013 | AGAAAGCGTTCGTGATGTA |
| NC_045512.2_19mer_win1_27036 | 27036 | 27054 | 811 | ACATCACGAACGCTTTCTT | 2014 | AAGAAAGCGTTCGTGATGT |
| NC_045512.2_19mer_win1_27037 | 27037 | 27055 | 812 | CATCACGAACGCTTTCTTA | 2015 | TAAGAAAGCGTTCGTGATG |
| NC_045512.2_19mer_win1_27038 | 27038 | 27056 | 813 | ATCACGAACGCTTTCTTAT | 2016 | ATAAGAAAGCGTTCGTGAT |
| NC_045512.2_19mer_win1_27039 | 27039 | 27057 | 814 | TCACGAACGCTTTCTTATT | 2017 | AATAAGAAAGCGTTCGTGA |
| NC_045512.2_19mer_win1_27040 | 27040 | 27058 | 815 | CACGAACGCTTTCTTATTA | 2018 | TAATAAGAAAGCGTTCGTG |
| NC_045512.2_19mer_win1_27041 | 27041 | 27059 | 816 | ACGAACGCTTTCTTATTAC | 2019 | GTAATAAGAAAGCGTTCGT |
| NC_045512.2_19mer_win1_27042 | 27042 | 27060 | 817 | CGAACGCTTTCTTATTACA | 2020 | TGTAATAAGAAAGCGTTCG |
| NC_045512.2_19mer_win1_27043 | 27043 | 27061 | 818 | GAACGCTTTCTTATTACAA | 2021 | TTGTAATAAGAAAGCGTTC |
| NC_045512.2_19mer_win1_27044 | 27044 | 27062 | 819 | AACGCTTTCTTATTACAAA | 2022 | TTTGTAATAAGAAAGCGTT |
| NC_045512.2_19mer_win1_27045 | 27045 | 27063 | 820 | ACGCTTTCTTATTACAAAT | 2023 | ATTTGTAATAAGAAAGCGT |
| NC_045512.2_19mer_win1_27046 | 27046 | 27064 | 821 | CGCTTTCTTATTACAAATT | 2024 | AATTTGTAATAAGAAAGCG |
| NC_045512.2_19mer_win1_27093 | 27093 | 27111 | 822 | TCAGGTTTTGCTGCATACA | 2025 | TGTATGCAGCAAAACCTGA |
| NC_045512.2_19mer_win1_27183 | 27183 | 27201 | 823 | GTACAGTAAGTGACAACAG | 2026 | CTGTTGTCACTTACTGTAC |
| NC_045512.2_19mer_win1_27184 | 27184 | 27202 | 824 | TACAGTAAGTGACAACAGA | 2027 | TCTGTTGTCACTTACTGTA |
| NC_045512.2_19mer_win1_27185 | 27185 | 27203 | 825 | ACAGTAAGTGACAACAGAT | 2028 | ATCTGTTGTCACTTACTGT |
| NC_045512.2_19mer_win1_27186 | 27186 | 27204 | 826 | CAGTAAGTGACAACAGATG | 2029 | CATCTGTTGTCACTTACTG |
| NC_045512.2_19mer_win1_27187 | 27187 | 27205 | 827 | AGTAAGTGACAACAGATGT | 2030 | ACATCTGTTGTCACTTACT |
| NC_045512.2_19mer_win1_27188 | 27188 | 27206 | 828 | GTAAGTGACAACAGATGTT | 2031 | AACATCTGTTGTCACTTAC |
| NC_045512.2_19mer_win1_27189 | 27189 | 27207 | 829 | TAAGTGACAACAGATGTTT | 2032 | AAACATCTGTTGTCACTTA |
| NC_045512.2_19mer_win1_27190 | 27190 | 27208 | 830 | AAGTGACAACAGATGTTTC | 2033 | GAAACATCTGTTGTCACTT |
| NC_045512.2_19mer_win1_27191 | 27191 | 27209 | 831 | AGTGACAACAGATGTTTCA | 2034 | TGAAACATCTGTTGTCACT |
| NC_045512.2_19mer_win1_27192 | 27192 | 27210 | 832 | GTGACAACAGATGTTTCAT | 2035 | ATGAAACATCTGTTGTCAC |
| NC_045512.2_19mer_win1_27193 | 27193 | 27211 | 833 | TGACAACAGATGTTTCATC | 2036 | GATGAAACATCTGTTGTCA |
| NC_045512.2_19mer_win1_27194 | 27194 | 27212 | 834 | GACAACAGATGTTTCATCT | 2037 | AGATGAAACATCTGTTGTC |
| NC_045512.2_19mer_win1_27382 | 27382 | 27400 | 835 | GATTAAACGAACATGAAAA | 2038 | TTTTCATGTTCGTTTAATC |
| NC_045512.2_19mer_win1_27383 | 27383 | 27401 | 836 | ATTAAACGAACATGAAAAT | 2039 | ATTTTCATGTTCGTTTAAT |
| NC_045512.2_19mer_win1_27384 | 27384 | 27402 | 837 | TTAAACGAACATGAAAATT | 2040 | AATTTTCATGTTCGTTTAA |
| NC_045512.2_19mer_win1_27385 | 27385 | 27403 | 838 | TAAACGAACATGAAAATTA | 2041 | TAATTTTCATGTTCGTTTA |
| NC_045512.2_19mer_win1_27386 | 27386 | 27404 | 839 | AAACGAACATGAAAATTAT | 2042 | ATAATTTTCATGTTCGTTT |
| NC_045512.2_19mer_win1_27387 | 27387 | 27405 | 840 | AACGAACATGAAAATTATT | 2043 | AATAATTTTCATGTTCGTT |
| NC_045512.2_19mer_win1_27388 | 27388 | 27406 | 841 | ACGAACATGAAAATTATTC | 2044 | GAATAATTTTCATGTTCGT |
| NC_045512.2_19mer_win1_27389 | 27389 | 27407 | 842 | CGAACATGAAAATTATTCT | 2045 | AGAATAATTTTCATGTTCG |
| NC_045512.2_19mer_win1_27511 | 27511 | 27529 | 843 | TACGAGGGCAATTCACCAT | 2046 | ATGGTGAATTGCCCTCGTA |
| NC_045512.2_19mer_win1_27512 | 27512 | 27530 | 844 | ACGAGGGCAATTCACCATT | 2047 | AATGGTGAATTGCCCTCGT |
| NC_045512.2_19mer_win1_27513 | 27513 | 27531 | 845 | CGAGGGCAATTCACCATTT | 2048 | AAATGGTGAATTGCCCTCG |
| NC_045512.2_19mer_win1_27514 | 27514 | 27532 | 846 | GAGGGCAATTCACCATTTC | 2049 | GAAATGGTGAATTGCCCTC |
| NC_045512.2_19mer_win1_27515 | 27515 | 27533 | 847 | AGGGCAATTCACCATTTCA | 2050 | TGAAATGGTGAATTGCCCT |
| NC_045512.2_19mer_win1_27771 | 27771 | 27789 | 848 | TTAATTGACTTCTATTTGT | 2051 | ACAAATAGAAGTCAATTAA |
| NC_045512.2_19mer_win1_27772 | 27772 | 27790 | 849 | TAATTGACTTCTATTTGTG | 2052 | CACAAATAGAAGTCAATTA |
| NC_045512.2_19mer_win1_27773 | 27773 | 27791 | 850 | AATTGACTTCTATTTGTGC | 2053 | GCACAAATAGAAGTCAATT |
| NC_045512.2_19mer_win1_27774 | 27774 | 27792 | 851 | ATTGACTTCTATTTGTGCT | 2054 | AGCACAAATAGAAGTCAAT |
| NC_045512.2_19mer_win1_27775 | 27775 | 27793 | 852 | TTGACTTCTATTTGTGCTT | 2055 | AAGCACAAATAGAAGTCAA |
| NC_045512.2_19mer_win1_27776 | 27776 | 27794 | 853 | TGACTTCTATTTGTGCTTT | 2056 | AAAGCACAAATAGAAGTCA |
| NC_045512.2_19mer_win1_27777 | 27777 | 27795 | 854 | GACTTCTATTTGTGCTTTT | 2057 | AAAAGCACAAATAGAAGTC |
| NC_045512.2_19mer_win1_27778 | 27778 | 27796 | 855 | ACTTCTATTTGTGCTTTTT | 2058 | AAAAAGCACAAATAGAAGT |
| NC_045512.2_19mer_win1_27779 | 27779 | 27797 | 856 | CTTCTATTTGTGCTTTTTA | 2059 | TAAAAAGCACAAATAGAAG |
| NC_045512.2_19mer_win1_27780 | 27780 | 27798 | 857 | TTCTATTTGTGCTTTTTAG | 2060 | CTAAAAAGCACAAATAGAA |
| NC_045512.2_19mer_win1_27781 | 27781 | 27799 | 858 | TCTATTTGTGCTTTTTAGC | 2061 | GCTAAAAAGCACAAATAGA |
| NC_045512.2_19mer_win1_27782 | 27782 | 27800 | 859 | CTATTTGTGCTTTTTAGCC | 2062 | GGCTAAAAAGCACAAATAG |
| NC_045512.2_19mer_win1_27783 | 27783 | 27801 | 860 | TATTTGTGCTTTTTAGCCT | 2063 | AGGCTAAAAAGCACAAATA |
| NC_045512.2_19mer_win1_27784 | 27784 | 27802 | 861 | ATTTGTGCTTTTTAGCCTT | 2064 | AAGGCTAAAAAGCACAAAT |
| NC_045512.2_19mer_win1_27785 | 27785 | 27803 | 862 | TTTGTGCTTTTTAGCCTTT | 2065 | AAAGGCTAAAAAGCACAAA |
| NC_045512.2_19mer_win1_27786 | 27786 | 27804 | 863 | TTGTGCTTTTTAGCCTTTC | 2066 | GAAAGGCTAAAAAGCACAA |
| NC_045512.2_19mer_win1_27787 | 27787 | 27805 | 864 | TGTGCTTTTTAGCCTTTCT | 2067 | AGAAAGGCTAAAAAGCACA |
| NC_045512.2_19mer_win1_27788 | 27788 | 27806 | 865 | GTGCTTTTTAGCCTTTCTG | 2068 | CAGAAAGGCTAAAAAGCAC |
| NC_045512.2_19mer_win1_27789 | 27789 | 27807 | 866 | TGCTTTTTAGCCTTTCTGC | 2069 | GCAGAAAGGCTAAAAAGCA |
| NC_045512.2_19mer_win1_27790 | 27790 | 27808 | 867 | GCTTTTTAGCCTTTCTGCT | 2070 | AGCAGAAAGGCTAAAAAGC |
| NC_045512.2_19mer_win1_27791 | 27791 | 27809 | 868 | CTTTTTAGCCTTTCTGCTA | 2071 | TAGCAGAAAGGCTAAAAAG |
| NC_045512.2_19mer_win1_27792 | 27792 | 27810 | 869 | TTTTTAGCCTTTCTGCTAT | 2072 | ATAGCAGAAAGGCTAAAAA |
| NC_045512.2_19mer_win1_27793 | 27793 | 27811 | 870 | TTTTAGCCTTTCTGCTATT | 2073 | AATAGCAGAAAGGCTAAAA |
| NC_045512.2_19mer_win1_27794 | 27794 | 27812 | 871 | TTTAGCCTTTCTGCTATTC | 2074 | GAATAGCAGAAAGGCTAAA |
| NC_045512.2_19mer_win1_27795 | 27795 | 27813 | 872 | TTAGCCTTTCTGCTATTCC | 2075 | GGAATAGCAGAAAGGCTAA |
| NC_045512.2_19mer_win1_27796 | 27796 | 27814 | 873 | TAGCCTTTCTGCTATTCCT | 2076 | AGGAATAGCAGAAAGGCTA |
| NC_045512.2_19mer_win1_27797 | 27797 | 27815 | 874 | AGCCTTTCTGCTATTCCTT | 2077 | AAGGAATAGCAGAAAGGCT |
| NC_045512.2_19mer_win1_27798 | 27798 | 27816 | 875 | GCCTTTCTGCTATTCCTTG | 2078 | CAAGGAATAGCAGAAAGGC |
| NC_045512.2_19mer_win1_27799 | 27799 | 27817 | 876 | CCTTTCTGCTATTCCTTGT | 2079 | ACAAGGAATAGCAGAAAGG |
| NC_045512.2_19mer_win1_27800 | 27800 | 27818 | 877 | CTTTCTGCTATTCCTTGTT | 2080 | AACAAGGAATAGCAGAAAG |
| NC_045512.2_19mer_win1_28270 | 28270 | 28288 | 878 | TAAAATGTCTGATAATGGA | 2081 | TCCATTATCAGACATTTTA |
| NC_045512.2_19mer_win1_28271 | 28271 | 28289 | 879 | AAAATGTCTGATAATGGAC | 2082 | GTCCATTATCAGACATTTT |
| NC_045512.2_19mer_win1_28272 | 28272 | 28290 | 880 | AAATGTCTGATAATGGACC | 2083 | GGTCCATTATCAGACATTT |
| NC_045512.2_19mer_win1_28273 | 28273 | 28291 | 881 | AATGTCTGATAATGGACCC | 2084 | GGGTCCATTATCAGACATT |
| NC_045512.2_19mer_win1_28274 | 28274 | 28292 | 882 | ATGTCTGATAATGGACCCC | 2085 | GGGGTCCATTATCAGACAT |
| NC_045512.2_19mer_win1_28275 | 28275 | 28293 | 883 | TGTCTGATAATGGACCCCA | 2086 | TGGGGTCCATTATCAGACA |
| NC_045512.2_19mer_win1_28276 | 28276 | 28294 | 884 | GTCTGATAATGGACCCCAA | 2087 | TTGGGGTCCATTATCAGAC |
| NC_045512.2_19mer_win1_28277 | 28277 | 28295 | 885 | TCTGATAATGGACCCCAAA | 2088 | TTTGGGGTCCATTATCAGA |
| NC_045512.2_19mer_win1_28278 | 28278 | 28296 | 886 | CTGATAATGGACCCCAAAA | 2089 | TTTTGGGGTCCATTATCAG |
| NC_045512.2_19mer_win1_28397 | 28397 | 28415 | 887 | CCCCAAGGTTTACCCAATA | 2090 | TATTGGGTAAACCTTGGGG |
| NC_045512.2_19mer_win1_28398 | 28398 | 28416 | 888 | CCCAAGGTTTACCCAATAA | 2091 | TTATTGGGTAAACCTTGGG |
| NC_045512.2_19mer_win1_28399 | 28399 | 28417 | 889 | CCAAGGTTTACCCAATAAT | 2092 | ATTATTGGGTAAACCTTGG |
| NC_045512.2_19mer_win1_28400 | 28400 | 28418 | 890 | CAAGGTTTACCCAATAATA | 2093 | TATTATTGGGTAAACCTTG |
| NC_045512.2_19mer_win1_28401 | 28401 | 28419 | 891 | AAGGTTTACCCAATAATAC | 2094 | GTATTATTGGGTAAACCTT |
| NC_045512.2_19mer_win1_28402 | 28402 | 28420 | 892 | AGGTTTACCCAATAATACT | 2095 | AGTATTATTGGGTAAACCT |
| NC_045512.2_19mer_win1_28403 | 28403 | 28421 | 893 | GGTTTACCCAATAATACTG | 2096 | CAGTATTATTGGGTAAACC |
| NC_045512.2_19mer_win1_28404 | 28404 | 28422 | 894 | GTTTACCCAATAATACTGC | 2097 | GCAGTATTATTGGGTAAAC |
| NC_045512.2_19mer_win1_28405 | 28405 | 28423 | 895 | TTTACCCAATAATACTGCG | 2098 | CGCAGTATTATTGGGTAAA |
| NC_045512.2_19mer_win1_28406 | 28406 | 28424 | 896 | TTACCCAATAATACTGCGT | 2099 | ACGCAGTATTATTGGGTAA |
| NC_045512.2_19mer_win1_28407 | 28407 | 28425 | 897 | TACCCAATAATACTGCGTC | 2100 | GACGCAGTATTATTGGGTA |
| NC_045512.2_19mer_win1_28408 | 28408 | 28426 | 898 | ACCCAATAATACTGCGTCT | 2101 | AGACGCAGTATTATTGGGT |
| NC_045512.2_19mer_win1_28409 | 28409 | 28427 | 899 | CCCAATAATACTGCGTCTT | 2102 | AAGACGCAGTATTATTGGG |
| NC_045512.2_19mer_win1_28410 | 28410 | 28428 | 900 | CCAATAATACTGCGTCTTG | 2103 | CAAGACGCAGTATTATTGG |
| NC_045512.2_19mer_win1_28411 | 28411 | 28429 | 901 | CAATAATACTGCGTCTTGG | 2104 | CCAAGACGCAGTATTATTG |
| NC_045512.2_19mer_win1_28412 | 28412 | 28430 | 902 | AATAATACTGCGTCTTGGT | 2105 | ACCAAGACGCAGTATTATT |
| NC_045512.2_19mer_win1_28413 | 28413 | 28431 | 903 | ATAATACTGCGTCTTGGTT | 2106 | AACCAAGACGCAGTATTAT |
| NC_045512.2_19mer_win1_28414 | 28414 | 28432 | 904 | TAATACTGCGTCTTGGTTC | 2107 | GAACCAAGACGCAGTATTA |
| NC_045512.2_19mer_win1_28415 | 28415 | 28433 | 905 | AATACTGCGTCTTGGTTCA | 2108 | TGAACCAAGACGCAGTATT |
| NC_045512.2_19mer_win1_28416 | 28416 | 28434 | 906 | ATACTGCGTCTTGGTTCAC | 2109 | GTGAACCAAGACGCAGTAT |
| NC_045512.2_19mer_win1_28513 | 28513 | 28531 | 907 | AGATGACCAAATTGGCTAC | 2110 | GTAGCCAATTTGGTCATCT |
| NC_045512.2_19mer_win1_28514 | 28514 | 28532 | 908 | GATGACCAAATTGGCTACT | 2111 | AGTAGCCAATTTGGTCATC |
| NC_045512.2_19mer_win1_28515 | 28515 | 28533 | 909 | ATGACCAAATTGGCTACTA | 2112 | TAGTAGCCAATTTGGTCAT |
| NC_045512.2_19mer_win1_28516 | 28516 | 28534 | 910 | TGACCAAATTGGCTACTAC | 2113 | GTAGTAGCCAATTTGGTCA |
| NC_045512.2_19mer_win1_28517 | 28517 | 28535 | 911 | GACCAAATTGGCTACTACC | 2114 | GGTAGTAGCCAATTTGGTC |
| NC_045512.2_19mer_win1_28518 | 28518 | 28536 | 912 | ACCAAATTGGCTACTACCG | 2115 | CGGTAGTAGCCAATTTGGT |
| NC_045512.2_19mer_win1_28519 | 28519 | 28537 | 913 | CCAAATTGGCTACTACCGA | 2116 | TCGGTAGTAGCCAATTTGG |
| NC_045512.2_19mer_win1_28520 | 28520 | 28538 | 914 | CAAATTGGCTACTACCGAA | 2117 | TTCGGTAGTAGCCAATTTG |
| NC_045512.2_19mer_win1_28521 | 28521 | 28539 | 915 | AAATTGGCTACTACCGAAG | 2118 | CTTCGGTAGTAGCCAATTT |
| NC_045512.2_19mer_win1_28522 | 28522 | 28540 | 916 | AATTGGCTACTACCGAAGA | 2119 | TCTTCGGTAGTAGCCAATT |
| NC_045512.2_19mer_win1_28523 | 28523 | 28541 | 917 | ATTGGCTACTACCGAAGAG | 2120 | CTCTTCGGTAGTAGCCAAT |
| NC_045512.2_19mer_win1_28524 | 28524 | 28542 | 918 | TTGGCTACTACCGAAGAGC | 2121 | GCTCTTCGGTAGTAGCCAA |
| NC_045512.2_19mer_win1_28525 | 28525 | 28543 | 919 | TGGCTACTACCGAAGAGCT | 2122 | AGCTCTTCGGTAGTAGCCA |
| NC_045512.2_19mer_win1_28526 | 28526 | 28544 | 920 | GGCTACTACCGAAGAGCTA | 2123 | TAGCTCTTCGGTAGTAGCC |
| NC_045512.2_19mer_win1_28527 | 28527 | 28545 | 921 | GCTACTACCGAAGAGCTAC | 2124 | GTAGCTCTTCGGTAGTAGC |
| NC_045512.2_19mer_win1_28528 | 28528 | 28546 | 922 | CTACTACCGAAGAGCTACC | 2125 | GGTAGCTCTTCGGTAGTAG |
| NC_045512.2_19mer_win1_28673 | 28673 | 28691 | 923 | GCAACTGAGGGAGCCTTGA | 2126 | TCAAGGCTCCCTCAGTTGC |
| NC_045512.2_19mer_win1_28674 | 28674 | 28692 | 924 | CAACTGAGGGAGCCTTGAA | 2127 | TTCAAGGCTCCCTCAGTTG |
| NC_045512.2_19mer_win1_28706 | 28706 | 28724 | 925 | CACATTGGCACCCGCAATC | 2128 | GATTGCGGGTGCCAATGTG |
| NC_045512.2_19mer_win1_28707 | 28707 | 28725 | 926 | ACATTGGCACCCGCAATCC | 2129 | GGATTGCGGGTGCCAATGT |
| NC_045512.2_19mer_win1_28708 | 28708 | 28726 | 927 | CATTGGCACCCGCAATCCT | 2130 | AGGATTGCGGGTGCCAATG |
| NC_045512.2_19mer_win1_28744 | 28744 | 28762 | 928 | CGTGCTACAACTTCCTCAA | 2131 | TTGAGGAAGTTGTAGCACG |
| NC_045512.2_19mer_win1_28745 | 28745 | 28763 | 929 | GTGCTACAACTTCCTCAAG | 2132 | CTTGAGGAAGTTGTAGCAC |
| NC_045512.2_19mer_win1_28746 | 28746 | 28764 | 930 | TGCTACAACTTCCTCAAGG | 2133 | CCTTGAGGAAGTTGTAGCA |
| NC_045512.2_19mer_win1_28747 | 28747 | 28765 | 931 | GCTACAACTTCCTCAAGGA | 2134 | TCCTTGAGGAAGTTGTAGC |
| NC_045512.2_19mer_win1_28748 | 28748 | 28766 | 932 | CTACAACTTCCTCAAGGAA | 2135 | TTCCTTGAGGAAGTTGTAG |
| NC_045512.2_19mer_win1_28749 | 28749 | 28767 | 933 | TACAACTTCCTCAAGGAAC | 2136 | GTTCCTTGAGGAAGTTGTA |
| NC_045512.2_19mer_win1_28750 | 28750 | 28768 | 934 | ACAACTTCCTCAAGGAACA | 2137 | TGTTCCTTGAGGAAGTTGT |
| NC_045512.2_19mer_win1_28751 | 28751 | 28769 | 935 | CAACTTCCTCAAGGAACAA | 2138 | TTGTTCCTTGAGGAAGTTG |
| NC_045512.2_19mer_win1_28752 | 28752 | 28770 | 936 | AACTTCCTCAAGGAACAAC | 2139 | GTTGTTCCTTGAGGAAGTT |
| NC_045512.2_19mer_win1_28753 | 28753 | 28771 | 937 | ACTTCCTCAAGGAACAACA | 2140 | TGTTGTTCCTTGAGGAAGT |
| NC_045512.2_19mer_win1_28754 | 28754 | 28772 | 938 | CTTCCTCAAGGAACAACAT | 2141 | ATGTTGTTCCTTGAGGAAG |
| NC_045512.2_19mer_win1_28755 | 28755 | 28773 | 939 | TTCCTCAAGGAACAACATT | 2142 | AATGTTGTTCCTTGAGGAA |
| NC_045512.2_19mer_win1_28756 | 28756 | 28774 | 940 | TCCTCAAGGAACAACATTG | 2143 | CAATGTTGTTCCTTGAGGA |
| NC_045512.2_19mer_win1_28757 | 28757 | 28775 | 941 | CCTCAAGGAACAACATTGC | 2144 | GCAATGTTGTTCCTTGAGG |
| NC_045512.2_19mer_win1_28758 | 28758 | 28776 | 942 | CTCAAGGAACAACATTGCC | 2145 | GGCAATGTTGTTCCTTGAG |
| NC_045512.2_19mer_win1_28759 | 28759 | 28777 | 943 | TCAAGGAACAACATTGCCA | 2146 | TGGCAATGTTGTTCCTTGA |
| NC_045512.2_19mer_win1_28760 | 28760 | 28778 | 944 | CAAGGAACAACATTGCCAA | 2147 | TTGGCAATGTTGTTCCTTG |
| NC_045512.2_19mer_win1_28761 | 28761 | 28779 | 945 | AAGGAACAACATTGCCAAA | 2148 | TTTGGCAATGTTGTTCCTT |
| NC_045512.2_19mer_win1_28762 | 28762 | 28780 | 946 | AGGAACAACATTGCCAAAA | 2149 | TTTTGGCAATGTTGTTCCT |
| NC_045512.2_19mer_win1_28763 | 28763 | 28781 | 947 | GGAACAACATTGCCAAAAG | 2150 | CTTTTGGCAATGTTGTTCC |
| NC_045512.2_19mer_win1_28764 | 28764 | 28782 | 948 | GAACAACATTGCCAAAAGG | 2151 | CCTTTTGGCAATGTTGTTC |
| NC_045512.2_19mer_win1_28765 | 28765 | 28783 | 949 | AACAACATTGCCAAAAGGC | 2152 | GCCTTTTGGCAATGTTGTT |
| NC_045512.2_19mer_win1_28766 | 28766 | 28784 | 950 | ACAACATTGCCAAAAGGCT | 2153 | AGCCTTTTGGCAATGTTGT |
| NC_045512.2_19mer_win1_28767 | 28767 | 28785 | 951 | CAACATTGCCAAAAGGCTT | 2154 | AAGCCTTTTGGCAATGTTG |
| NC_045512.2_19mer_win1_28768 | 28768 | 28786 | 952 | AACATTGCCAAAAGGCTTC | 2155 | GAAGCCTTTTGGCAATGTT |
| NC_045512.2_19mer_win1_28769 | 28769 | 28787 | 953 | ACATTGCCAAAAGGCTTCT | 2156 | AGAAGCCTTTTGGCAATGT |
| NC_045512.2_19mer_win1_28770 | 28770 | 28788 | 954 | CATTGCCAAAAGGCTTCTA | 2157 | TAGAAGCCTTTTGGCAATG |
| NC_045512.2_19mer_win1_28771 | 28771 | 28789 | 955 | ATTGCCAAAAGGCTTCTAC | 2158 | GTAGAAGCCTTTTGGCAAT |
| NC_045512.2_19mer_win1_28772 | 28772 | 28790 | 956 | TTGCCAAAAGGCTTCTACG | 2159 | CGTAGAAGCCTTTTGGCAA |
| NC_045512.2_19mer_win1_28773 | 28773 | 28791 | 957 | TGCCAAAAGGCTTCTACGC | 2160 | GCGTAGAAGCCTTTTGGCA |
| NC_045512.2_19mer_win1_28774 | 28774 | 28792 | 958 | GCCAAAAGGCTTCTACGCA | 2161 | TGCGTAGAAGCCTTTTGGC |
| NC_045512.2_19mer_win1_28775 | 28775 | 28793 | 959 | CCAAAAGGCTTCTACGCAG | 2162 | CTGCGTAGAAGCCTTTTGG |
| NC_045512.2_19mer_win1_28776 | 28776 | 28794 | 960 | CAAAAGGCTTCTACGCAGA | 2163 | TCTGCGTAGAAGCCTTTTG |
| NC_045512.2_19mer_win1_28799 | 28799 | 28817 | 961 | AGCAGAGGCGGCAGTCAAG | 2164 | CTTGACTGCCGCCTCTGCT |
| NC_045512.2_19mer_win1_28800 | 28800 | 28818 | 962 | GCAGAGGCGGCAGTCAAGC | 2165 | GCTTGACTGCCGCCTCTGC |
| NC_045512.2_19mer_win1_28801 | 28801 | 28819 | 963 | CAGAGGCGGCAGTCAAGCC | 2166 | GGCTTGACTGCCGCCTCTG |
| NC_045512.2_19mer_win1_28802 | 28802 | 28820 | 964 | AGAGGCGGCAGTCAAGCCT | 2167 | AGGCTTGACTGCCGCCTCT |
| NC_045512.2_19mer_win1_28803 | 28803 | 28821 | 965 | GAGGCGGCAGTCAAGCCTC | 2168 | GAGGCTTGACTGCCGCCTC |
| NC_045512.2_19mer_win1_28804 | 28804 | 28822 | 966 | AGGCGGCAGTCAAGCCTCT | 2169 | AGAGGCTTGACTGCCGCCT |
| NC_045512.2_19mer_win1_28805 | 28805 | 28823 | 967 | GGCGGCAGTCAAGCCTCTT | 2170 | AAGAGGCTTGACTGCCGCC |
| NC_045512.2_19mer_win1_28806 | 28806 | 28824 | 968 | GCGGCAGTCAAGCCTCTTC | 2171 | GAAGAGGCTTGACTGCCGC |
| NC_045512.2_19mer_win1_28807 | 28807 | 28825 | 969 | CGGCAGTCAAGCCTCTTCT | 2172 | AGAAGAGGCTTGACTGCCG |
| NC_045512.2_19mer_win1_28808 | 28808 | 28826 | 970 | GGCAGTCAAGCCTCTTCTC | 2173 | GAGAAGAGGCTTGACTGCC |
| NC_045512.2_19mer_win1_28809 | 28809 | 28827 | 971 | GCAGTCAAGCCTCTTCTCG | 2174 | CGAGAAGAGGCTTGACTGC |
| NC_045512.2_19mer_win1_28946 | 28946 | 28964 | 972 | GACAGATTGAACCAGCTTG | 2175 | CAAGCTGGTTCAATCTGTC |
| NC_045512.2_19mer_win1_28947 | 28947 | 28965 | 973 | ACAGATTGAACCAGCTTGA | 2176 | TCAAGCTGGTTCAATCTGT |
| NC_045512.2_19mer_win1_28948 | 28948 | 28966 | 974 | CAGATTGAACCAGCTTGAG | 2177 | CTCAAGCTGGTTCAATCTG |
| NC_045512.2_19mer_win1_28949 | 28949 | 28967 | 975 | AGATTGAACCAGCTTGAGA | 2178 | TCTCAAGCTGGTTCAATCT |
| NC_045512.2_19mer_win1_28950 | 28950 | 28968 | 976 | GATTGAACCAGCTTGAGAG | 2179 | CTCTCAAGCTGGTTCAATC |
| NC_045512.2_19mer_win1_28951 | 28951 | 28969 | 977 | ATTGAACCAGCTTGAGAGC | 2180 | GCTCTCAAGCTGGTTCAAT |
| NC_045512.2_19mer_win1_28952 | 28952 | 28970 | 978 | TTGAACCAGCTTGAGAGCA | 2181 | TGCTCTCAAGCTGGTTCAA |
| NC_045512.2_19mer_win1_28953 | 28953 | 28971 | 979 | TGAACCAGCTTGAGAGCAA | 2182 | TTGCTCTCAAGCTGGTTCA |
| NC_045512.2_19mer_win1_28954 | 28954 | 28972 | 980 | GAACCAGCTTGAGAGCAAA | 2183 | TTTGCTCTCAAGCTGGTTC |
| NC_045512.2_19mer_win1_28976 | 28976 | 28994 | 981 | TCTGGTAAAGGCCAACAAC | 2184 | GTTGTTGGCCTTTACCAGA |
| NC_045512.2_19mer_win1_28977 | 28977 | 28995 | 982 | CTGGTAAAGGCCAACAACA | 2185 | TGTTGTTGGCCTTTACCAG |
| NC_045512.2_19mer_win1_28978 | 28978 | 28996 | 983 | TGGTAAAGGCCAACAACAA | 2186 | TTGTTGTTGGCCTTTACCA |
| NC_045512.2_19mer_win1_28979 | 28979 | 28997 | 984 | GGTAAAGGCCAACAACAAC | 2187 | GTTGTTGTTGGCCTTTACC |
| NC_045512.2_19mer_win1_28980 | 28980 | 28998 | 985 | GTAAAGGCCAACAACAACA | 2188 | TGTTGTTGTTGGCCTTTAC |
| NC_045512.2_19mer_win1_28981 | 28981 | 28999 | 986 | TAAAGGCCAACAACAACAA | 2189 | TTGTTGTTGTTGGCCTTTA |
| NC_045512.2_19mer_win1_28982 | 28982 | 29000 | 987 | AAAGGCCAACAACAACAAG | 2190 | CTTGTTGTTGTTGGCCTTT |
| NC_045512.2_19mer_win1_28983 | 28983 | 29001 | 988 | AAGGCCAACAACAACAAGG | 2191 | CCTTGTTGTTGTTGGCCTT |
| NC_045512.2_19mer_win1_28984 | 28984 | 29002 | 989 | AGGCCAACAACAACAAGGC | 2192 | GCCTTGTTGTTGTTGGCCT |
| NC_045512.2_19mer_win1_28985 | 28985 | 29003 | 990 | GGCCAACAACAACAAGGCC | 2193 | GGCCTTGTTGTTGTTGGCC |
| NC_045512.2_19mer_win1_28986 | 28986 | 29004 | 991 | GCCAACAACAACAAGGCCA | 2194 | TGGCCTTGTTGTTGTTGGC |
| NC_045512.2_19mer_win1_28987 | 28987 | 29005 | 992 | CCAACAACAACAAGGCCAA | 2195 | TTGGCCTTGTTGTTGTTGG |
| NC_045512.2_19mer_win1_28988 | 28988 | 29006 | 993 | CAACAACAACAAGGCCAAA | 2196 | TTTGGCCTTGTTGTTGTTG |
| NC_045512.2_19mer_win1_28989 | 28989 | 29007 | 994 | AACAACAACAAGGCCAAAC | 2197 | GTTTGGCCTTGTTGTTGTT |
| NC_045512.2_19mer_win1_28990 | 28990 | 29008 | 995 | ACAACAACAAGGCCAAACT | 2198 | AGTTTGGCCTTGTTGTTGT |
| NC_045512.2_19mer_win1_28991 | 28991 | 29009 | 996 | CAACAACAAGGCCAAACTG | 2199 | CAGTTTGGCCTTGTTGTTG |
| NC_045512.2_19mer_win1_28992 | 28992 | 29010 | 997 | AACAACAAGGCCAAACTGT | 2200 | ACAGTTTGGCCTTGTTGTT |
| NC_045512.2_19mer_win1_28993 | 28993 | 29011 | 998 | ACAACAAGGCCAAACTGTC | 2201 | GACAGTTTGGCCTTGTTGT |
| NC_045512.2_19mer_win1_28994 | 28994 | 29012 | 999 | CAACAAGGCCAAACTGTCA | 2202 | TGACAGTTTGGCCTTGTTG |
| NC_045512.2_19mer_win1_28995 | 28995 | 29013 | 1000 | AACAAGGCCAAACTGTCAC | 2203 | GTGACAGTTTGGCCTTGTT |
| NC_045512.2_19mer_win1_28996 | 28996 | 29014 | 1001 | ACAAGGCCAAACTGTCACT | 2204 | AGTGACAGTTTGGCCTTGT |
| NC_045512.2_19mer_win1_28997 | 28997 | 29015 | 1002 | CAAGGCCAAACTGTCACTA | 2205 | TAGTGACAGTTTGGCCTTG |
| NC_045512.2_19mer_win1_28998 | 28998 | 29016 | 1003 | AAGGCCAAACTGTCACTAA | 2206 | TTAGTGACAGTTTGGCCTT |
| NC_045512.2_19mer_win1_28999 | 28999 | 29017 | 1004 | AGGCCAAACTGTCACTAAG | 2207 | CTTAGTGACAGTTTGGCCT |
| NC_045512.2_19mer_win1_29000 | 29000 | 29018 | 1005 | GGCCAAACTGTCACTAAGA | 2208 | TCTTAGTGACAGTTTGGCC |
| NC_045512.2_19mer_win1_29001 | 29001 | 29019 | 1006 | GCCAAACTGTCACTAAGAA | 2209 | TTCTTAGTGACAGTTTGGC |
| NC_045512.2_19mer_win1_29002 | 29002 | 29020 | 1007 | CCAAACTGTCACTAAGAAA | 2210 | TTTCTTAGTGACAGTTTGG |
| NC_045512.2_19mer_win1_29003 | 29003 | 29021 | 1008 | CAAACTGTCACTAAGAAAT | 2211 | ATTTCTTAGTGACAGTTTG |
| NC_045512.2_19mer_win1_29004 | 29004 | 29022 | 1009 | AAACTGTCACTAAGAAATC | 2212 | GATTTCTTAGTGACAGTTT |
| NC_045512.2_19mer_win1_29005 | 29005 | 29023 | 1010 | AACTGTCACTAAGAAATCT | 2213 | AGATTTCTTAGTGACAGTT |
| NC_045512.2_19mer_win1_29006 | 29006 | 29024 | 1011 | ACTGTCACTAAGAAATCTG | 2214 | CAGATTTCTTAGTGACAGT |
| NC_045512.2_19mer_win1_29007 | 29007 | 29025 | 1012 | CTGTCACTAAGAAATCTGC | 2215 | GCAGATTTCTTAGTGACAG |
| NC_045512.2_19mer_win1_29008 | 29008 | 29026 | 1013 | TGTCACTAAGAAATCTGCT | 2216 | AGCAGATTTCTTAGTGACA |
| NC_045512.2_19mer_win1_29009 | 29009 | 29027 | 1014 | GTCACTAAGAAATCTGCTG | 2217 | CAGCAGATTTCTTAGTGAC |
| NC_045512.2_19mer_win1_29010 | 29010 | 29028 | 1015 | TCACTAAGAAATCTGCTGC | 2218 | GCAGCAGATTTCTTAGTGA |
| NC_045512.2_19mer_win1_29011 | 29011 | 29029 | 1016 | CACTAAGAAATCTGCTGCT | 2219 | AGCAGCAGATTTCTTAGTG |
| NC_045512.2_19mer_win1_29012 | 29012 | 29030 | 1017 | ACTAAGAAATCTGCTGCTG | 2220 | CAGCAGCAGATTTCTTAGT |
| NC_045512.2_19mer_win1_29013 | 29013 | 29031 | 1018 | CTAAGAAATCTGCTGCTGA | 2221 | TCAGCAGCAGATTTCTTAG |
| NC_045512.2_19mer_win1_29014 | 29014 | 29032 | 1019 | TAAGAAATCTGCTGCTGAG | 2222 | CTCAGCAGCAGATTTCTTA |
| NC_045512.2_19mer_win1_29015 | 29015 | 29033 | 1020 | AAGAAATCTGCTGCTGAGG | 2223 | CCTCAGCAGCAGATTTCTT |
| NC_045512.2_19mer_win1_29016 | 29016 | 29034 | 1021 | AGAAATCTGCTGCTGAGGC | 2224 | GCCTCAGCAGCAGATTTCT |
| NC_045512.2_19mer_win1_29144 | 29144 | 29162 | 1022 | CTAATCAGACAAGGAACTG | 2225 | CAGTTCCTTGTCTGATTAG |
| NC_045512.2_19mer_win1_29145 | 29145 | 29163 | 1023 | TAATCAGACAAGGAACTGA | 2226 | TCAGTTCCTTGTCTGATTA |
| NC_045512.2_19mer_win1_29146 | 29146 | 29164 | 1024 | AATCAGACAAGGAACTGAT | 2227 | ATCAGTTCCTTGTCTGATT |
| NC_045512.2_19mer_win1_29147 | 29147 | 29165 | 1025 | ATCAGACAAGGAACTGATT | 2228 | AATCAGTTCCTTGTCTGAT |
| NC_045512.2_19mer_win1_29148 | 29148 | 29166 | 1026 | TCAGACAAGGAACTGATTA | 2229 | TAATCAGTTCCTTGTCTGA |
| NC_045512.2_19mer_win1_29149 | 29149 | 29167 | 1027 | CAGACAAGGAACTGATTAC | 2230 | GTAATCAGTTCCTTGTCTG |
| NC_045512.2_19mer_win1_29150 | 29150 | 29168 | 1028 | AGACAAGGAACTGATTACA | 2231 | TGTAATCAGTTCCTTGTCT |
| NC_045512.2_19mer_win1_29151 | 29151 | 29169 | 1029 | GACAAGGAACTGATTACAA | 2232 | TTGTAATCAGTTCCTTGTC |
| NC_045512.2_19mer_win1_29152 | 29152 | 29170 | 1030 | ACAAGGAACTGATTACAAA | 2233 | TTTGTAATCAGTTCCTTGT |
| NC_045512.2_19mer_win1_29153 | 29153 | 29171 | 1031 | CAAGGAACTGATTACAAAC | 2234 | GTTTGTAATCAGTTCCTTG |
| NC_045512.2_19mer_win1_29154 | 29154 | 29172 | 1032 | AAGGAACTGATTACAAACA | 2235 | TGTTTGTAATCAGTTCCTT |
| NC_045512.2_19mer_win1_29174 | 29174 | 29192 | 1033 | TGGCCGCAAATTGCACAAT | 2236 | ATTGTGCAATTTGCGGCCA |
| NC_045512.2_19mer_win1_29175 | 29175 | 29193 | 1034 | GGCCGCAAATTGCACAATT | 2237 | AATTGTGCAATTTGCGGCC |
| NC_045512.2_19mer_win1_29176 | 29176 | 29194 | 1035 | GCCGCAAATTGCACAATTT | 2238 | AAATTGTGCAATTTGCGGC |
| NC_045512.2_19mer_win1_29177 | 29177 | 29195 | 1036 | CCGCAAATTGCACAATTTG | 2239 | CAAATTGTGCAATTTGCGG |
| NC_045512.2_19mer_win1_29178 | 29178 | 29196 | 1037 | CGCAAATTGCACAATTTGC | 2240 | GCAAATTGTGCAATTTGCG |
| NC_045512.2_19mer_win1_29228 | 29228 | 29246 | 1038 | CGCATTGGCATGGAAGTCA | 2241 | TGACTTCCATGCCAATGCG |
| NC_045512.2_19mer_win1_29229 | 29229 | 29247 | 1039 | GCATTGGCATGGAAGTCAC | 2242 | GTGACTTCCATGCCAATGC |
| NC_045512.2_19mer_win1_29230 | 29230 | 29248 | 1040 | CATTGGCATGGAAGTCACA | 2243 | TGTGACTTCCATGCCAATG |
| NC_045512.2_19mer_win1_29231 | 29231 | 29249 | 1041 | ATTGGCATGGAAGTCACAC | 2244 | GTGTGACTTCCATGCCAAT |
| NC_045512.2_19mer_win1_29232 | 29232 | 29250 | 1042 | TTGGCATGGAAGTCACACC | 2245 | GGTGTGACTTCCATGCCAA |
| NC_045512.2_19mer_win1_29233 | 29233 | 29251 | 1043 | TGGCATGGAAGTCACACCT | 2246 | AGGTGTGACTTCCATGCCA |
| NC_045512.2_19mer_win1_29234 | 29234 | 29252 | 1044 | GGCATGGAAGTCACACCTT | 2247 | AAGGTGTGACTTCCATGCC |
| NC_045512.2_19mer_win1_29235 | 29235 | 29253 | 1045 | GCATGGAAGTCACACCTTC | 2248 | GAAGGTGTGACTTCCATGC |
| NC_045512.2_19mer_win1_29236 | 29236 | 29254 | 1046 | CATGGAAGTCACACCTTCG | 2249 | CGAAGGTGTGACTTCCATG |
| NC_045512.2_19mer_win1_29237 | 29237 | 29255 | 1047 | ATGGAAGTCACACCTTCGG | 2250 | CCGAAGGTGTGACTTCCAT |
| NC_045512.2_19mer_win1_29238 | 29238 | 29256 | 1048 | TGGAAGTCACACCTTCGGG | 2251 | CCCGAAGGTGTGACTTCCA |
| NC_045512.2_19mer_win1_29239 | 29239 | 29257 | 1049 | GGAAGTCACACCTTCGGGA | 2252 | TCCCGAAGGTGTGACTTCC |
| NC_045512.2_19mer_win1_29240 | 29240 | 29258 | 1050 | GAAGTCACACCTTCGGGAA | 2253 | TTCCCGAAGGTGTGACTTC |
| NC_045512.2_19mer_win1_29241 | 29241 | 29259 | 1051 | AAGTCACACCTTCGGGAAC | 2254 | GTTCCCGAAGGTGTGACTT |
| NC_045512.2_19mer_win1_29285 | 29285 | 29303 | 1052 | AAATTGGATGACAAAGATC | 2255 | GATCTTTGTCATCCAATTT |
| NC_045512.2_19mer_win1_29286 | 29286 | 29304 | 1053 | AATTGGATGACAAAGATCC | 2256 | GGATCTTTGTCATCCAATT |
| NC_045512.2_19mer_win1_29287 | 29287 | 29305 | 1054 | ATTGGATGACAAAGATCCA | 2257 | TGGATCTTTGTCATCCAAT |
| NC_045512.2_19mer_win1_29342 | 29342 | 29360 | 1055 | ATTGACGCATACAAAACAT | 2258 | ATGTTTTGTATGCGTCAAT |
| NC_045512.2_19mer_win1_29343 | 29343 | 29361 | 1056 | TTGACGCATACAAAACATT | 2259 | AATGTTTTGTATGCGTCAA |
| NC_045512.2_19mer_win1_29344 | 29344 | 29362 | 1057 | TGACGCATACAAAACATTC | 2260 | GAATGTTTTGTATGCGTCA |
| NC_045512.2_19mer_win1_29345 | 29345 | 29363 | 1058 | GACGCATACAAAACATTCC | 2261 | GGAATGTTTTGTATGCGTC |
| NC_045512.2_19mer_win1_29346 | 29346 | 29364 | 1059 | ACGCATACAAAACATTCCC | 2262 | GGGAATGTTTTGTATGCGT |
| NC_045512.2_19mer_win1_29347 | 29347 | 29365 | 1060 | CGCATACAAAACATTCCCA | 2263 | TGGGAATGTTTTGTATGCG |
| NC_045512.2_19mer_win1_29348 | 29348 | 29366 | 1061 | GCATACAAAACATTCCCAC | 2264 | GTGGGAATGTTTTGTATGC |
| NC_045512.2_19mer_win1_29349 | 29349 | 29367 | 1062 | CATACAAAACATTCCCACC | 2265 | GGTGGGAATGTTTTGTATG |
| NC_045512.2_19mer_win1_29350 | 29350 | 29368 | 1063 | ATACAAAACATTCCCACCA | 2266 | TGGTGGGAATGTTTTGTAT |
| NC_045512.2_19mer_win1_29351 | 29351 | 29369 | 1064 | TACAAAACATTCCCACCAA | 2267 | TTGGTGGGAATGTTTTGTA |
| NC_045512.2_19mer_win1_29352 | 29352 | 29370 | 1065 | ACAAAACATTCCCACCAAC | 2268 | GTTGGTGGGAATGTTTTGT |
| NC_045512.2_19mer_win1_29353 | 29353 | 29371 | 1066 | CAAAACATTCCCACCAACA | 2269 | TGTTGGTGGGAATGTTTTG |
| NC_045512.2_19mer_win1_29354 | 29354 | 29372 | 1067 | AAAACATTCCCACCAACAG | 2270 | CTGTTGGTGGGAATGTTTT |
| NC_045512.2_19mer_win1_29355 | 29355 | 29373 | 1068 | AAACATTCCCACCAACAGA | 2271 | TCTGTTGGTGGGAATGTTT |
| NC_045512.2_19mer_win1_29356 | 29356 | 29374 | 1069 | AACATTCCCACCAACAGAG | 2272 | CTCTGTTGGTGGGAATGTT |
| NC_045512.2_19mer_win1_29357 | 29357 | 29375 | 1070 | ACATTCCCACCAACAGAGC | 2273 | GCTCTGTTGGTGGGAATGT |
| NC_045512.2_19mer_win1_29358 | 29358 | 29376 | 1071 | CATTCCCACCAACAGAGCC | 2274 | GGCTCTGTTGGTGGGAATG |
| NC_045512.2_19mer_win1_29359 | 29359 | 29377 | 1072 | ATTCCCACCAACAGAGCCT | 2275 | AGGCTCTGTTGGTGGGAAT |
| NC_045512.2_19mer_win1_29360 | 29360 | 29378 | 1073 | TTCCCACCAACAGAGCCTA | 2276 | TAGGCTCTGTTGGTGGGAA |
| NC_045512.2_19mer_win1_29361 | 29361 | 29379 | 1074 | TCCCACCAACAGAGCCTAA | 2277 | TTAGGCTCTGTTGGTGGGA |
| NC_045512.2_19mer_win1_29362 | 29362 | 29380 | 1075 | CCCACCAACAGAGCCTAAA | 2278 | TTTAGGCTCTGTTGGTGGG |
| NC_045512.2_19mer_win1_29363 | 29363 | 29381 | 1076 | CCACCAACAGAGCCTAAAA | 2279 | TTTTAGGCTCTGTTGGTGG |
| NC_045512.2_19mer_win1_29364 | 29364 | 29382 | 1077 | CACCAACAGAGCCTAAAAA | 2280 | TTTTTAGGCTCTGTTGGTG |
| NC_045512.2_19mer_win1_29365 | 29365 | 29383 | 1078 | ACCAACAGAGCCTAAAAAG | 2281 | CTTTTTAGGCTCTGTTGGT |
| NC_045512.2_19mer_win1_29366 | 29366 | 29384 | 1079 | CCAACAGAGCCTAAAAAGG | 2282 | CCTTTTTAGGCTCTGTTGG |
| NC_045512.2_19mer_win1_29367 | 29367 | 29385 | 1080 | CAACAGAGCCTAAAAAGGA | 2283 | TCCTTTTTAGGCTCTGTTG |
| NC_045512.2_19mer_win1_29368 | 29368 | 29386 | 1081 | AACAGAGCCTAAAAAGGAC | 2284 | GTCCTTTTTAGGCTCTGTT |
| NC_045512.2_19mer_win1_29369 | 29369 | 29387 | 1082 | ACAGAGCCTAAAAAGGACA | 2285 | TGTCCTTTTTAGGCTCTGT |
| NC_045512.2_19mer_win1_29370 | 29370 | 29388 | 1083 | CAGAGCCTAAAAAGGACAA | 2286 | TTGTCCTTTTTAGGCTCTG |
| NC_045512.2_19mer_win1_29371 | 29371 | 29389 | 1084 | AGAGCCTAAAAAGGACAAA | 2287 | TTTGTCCTTTTTAGGCTCT |
| NC_045512.2_19mer_win1_29372 | 29372 | 29390 | 1085 | GAGCCTAAAAAGGACAAAA | 2288 | TTTTGTCCTTTTTAGGCTC |
| NC_045512.2_19mer_win1_29373 | 29373 | 29391 | 1086 | AGCCTAAAAAGGACAAAAA | 2289 | TTTTTGTCCTTTTTAGGCT |
| NC_045512.2_19mer_win1_29374 | 29374 | 29392 | 1087 | GCCTAAAAAGGACAAAAAG | 2290 | CTTTTTGTCCTTTTTAGGC |
| NC_045512.2_19mer_win1_29375 | 29375 | 29393 | 1088 | CCTAAAAAGGACAAAAAGA | 2291 | TCTTTTTGTCCTTTTTAGG |
| NC_045512.2_19mer_win1_29376 | 29376 | 29394 | 1089 | CTAAAAAGGACAAAAAGAA | 2292 | TTCTTTTTGTCCTTTTTAG |
| NC_045512.2_19mer_win1_29444 | 29444 | 29462 | 1090 | ACTGTGACTCTTCTTCCTG | 2293 | CAGGAAGAAGAGTCACAGT |
| NC_045512.2_19mer_win1_29445 | 29445 | 29463 | 1091 | CTGTGACTCTTCTTCCTGC | 2294 | GCAGGAAGAAGAGTCACAG |
| NC_045512.2_19mer_win1_29543 | 29543 | 29561 | 1092 | GACCACACAAGGCAGATGG | 2295 | CCATCTGCCTTGTGTGGTC |
| NC_045512.2_19mer_win1_29544 | 29544 | 29562 | 1093 | ACCACACAAGGCAGATGGG | 2296 | CCCATCTGCCTTGTGTGGT |
| NC_045512.2_19mer_win1_29545 | 29545 | 29563 | 1094 | CCACACAAGGCAGATGGGC | 2297 | GCCCATCTGCCTTGTGTGG |
| NC_045512.2_19mer_win1_29546 | 29546 | 29564 | 1095 | CACACAAGGCAGATGGGCT | 2298 | AGCCCATCTGCCTTGTGTG |
| NC_045512.2_19mer_win1_29547 | 29547 | 29565 | 1096 | ACACAAGGCAGATGGGCTA | 2299 | TAGCCCATCTGCCTTGTGT |
| NC_045512.2_19mer_win1_29548 | 29548 | 29566 | 1097 | CACAAGGCAGATGGGCTAT | 2300 | ATAGCCCATCTGCCTTGTG |
| NC_045512.2_19mer_win1_29598 | 29598 | 29616 | 1098 | ATAGTCTACTCTTGTGCAG | 2301 | CTGCACAAGAGTAGACTAT |
| NC_045512.2_19mer_win1_29599 | 29599 | 29617 | 1099 | TAGTCTACTCTTGTGCAGA | 2302 | TCTGCACAAGAGTAGACTA |
| NC_045512.2_19mer_win1_29600 | 29600 | 29618 | 1100 | AGTCTACTCTTGTGCAGAA | 2303 | TTCTGCACAAGAGTAGACT |
| NC_045512.2_19mer_win1_29601 | 29601 | 29619 | 1101 | GTCTACTCTTGTGCAGAAT | 2304 | ATTCTGCACAAGAGTAGAC |
| NC_045512.2_19mer_win1_29602 | 29602 | 29620 | 1102 | TCTACTCTTGTGCAGAATG | 2305 | CATTCTGCACAAGAGTAGA |
| NC_045512.2_19mer_win1_29603 | 29603 | 29621 | 1103 | CTACTCTTGTGCAGAATGA | 2306 | TCATTCTGCACAAGAGTAG |
| NC_045512.2_19mer_win1_29604 | 29604 | 29622 | 1104 | TACTCTTGTGCAGAATGAA | 2307 | TTCATTCTGCACAAGAGTA |
| NC_045512.2_19mer_win1_29605 | 29605 | 29623 | 1105 | ACTCTTGTGCAGAATGAAT | 2308 | ATTCATTCTGCACAAGAGT |
| NC_045512.2_19mer_win1_29606 | 29606 | 29624 | 1106 | CTCTTGTGCAGAATGAATT | 2309 | AATTCATTCTGCACAAGAG |
| NC_045512.2_19mer_win1_29607 | 29607 | 29625 | 1107 | TCTTGTGCAGAATGAATTC | 2310 | GAATTCATTCTGCACAAGA |
| NC_045512.2_19mer_win1_29608 | 29608 | 29626 | 1108 | CTTGTGCAGAATGAATTCT | 2311 | AGAATTCATTCTGCACAAG |
| NC_045512.2_19mer_win1_29609 | 29609 | 29627 | 1109 | TTGTGCAGAATGAATTCTC | 2312 | GAGAATTCATTCTGCACAA |
| NC_045512.2_19mer_win1_29610 | 29610 | 29628 | 1110 | TGTGCAGAATGAATTCTCG | 2313 | CGAGAATTCATTCTGCACA |
| NC_045512.2_19mer_win1_29611 | 29611 | 29629 | 1111 | GTGCAGAATGAATTCTCGT | 2314 | ACGAGAATTCATTCTGCAC |
| NC_045512.2_19mer_win1_29612 | 29612 | 29630 | 1112 | TGCAGAATGAATTCTCGTA | 2315 | TACGAGAATTCATTCTGCA |
| NC_045512.2_19mer_win1_29652 | 29652 | 29670 | 1113 | TAGTTAACTTTAATCTCAC | 2316 | GTGAGATTAAAGTTAACTA |
| NC_045512.2_19mer_win1_29653 | 29653 | 29671 | 1114 | AGTTAACTTTAATCTCACA | 2317 | TGTGAGATTAAAGTTAACT |
| NC_045512.2_19mer_win1_29654 | 29654 | 29672 | 1115 | GTTAACTTTAATCTCACAT | 2318 | ATGTGAGATTAAAGTTAAC |
| NC_045512.2_19mer_win1_29655 | 29655 | 29673 | 1116 | TTAACTTTAATCTCACATA | 2319 | TATGTGAGATTAAAGTTAA |
| NC_045512.2_19mer_win1_29656 | 29656 | 29674 | 1117 | TAACTTTAATCTCACATAG | 2320 | CTATGTGAGATTAAAGTTA |
| NC_045512.2_19mer_win1_29657 | 29657 | 29675 | 1118 | AACTTTAATCTCACATAGC | 2321 | GCTATGTGAGATTAAAGTT |
| NC_045512.2_19mer_win1_29658 | 29658 | 29676 | 1119 | ACTTTAATCTCACATAGCA | 2322 | TGCTATGTGAGATTAAAGT |
| NC_045512.2_19mer_win1_29659 | 29659 | 29677 | 1120 | CTTTAATCTCACATAGCAA | 2323 | TTGCTATGTGAGATTAAAG |
| NC_045512.2_19mer_win1_29660 | 29660 | 29678 | 1121 | TTTAATCTCACATAGCAAT | 2324 | ATTGCTATGTGAGATTAAA |
| NC_045512.2_19mer_win1_29661 | 29661 | 29679 | 1122 | TTAATCTCACATAGCAATC | 2325 | GATTGCTATGTGAGATTAA |
| NC_045512.2_19mer_win1_29662 | 29662 | 29680 | 1123 | TAATCTCACATAGCAATCT | 2326 | AGATTGCTATGTGAGATTA |
| NC_045512.2_19mer_win1_29663 | 29663 | 29681 | 1124 | AATCTCACATAGCAATCTT | 2327 | AAGATTGCTATGTGAGATT |
| NC_045512.2_19mer_win1_29664 | 29664 | 29682 | 1125 | ATCTCACATAGCAATCTTT | 2328 | AAAGATTGCTATGTGAGAT |
| NC_045512.2_19mer_win1_29665 | 29665 | 29683 | 1126 | TCTCACATAGCAATCTTTA | 2329 | TAAAGATTGCTATGTGAGA |
| NC_045512.2_19mer_win1_29666 | 29666 | 29684 | 1127 | CTCACATAGCAATCTTTAA | 2330 | TTAAAGATTGCTATGTGAG |
| NC_045512.2_19mer_win1_29667 | 29667 | 29685 | 1128 | TCACATAGCAATCTTTAAT | 2331 | ATTAAAGATTGCTATGTGA |
| NC_045512.2_19mer_win1_29668 | 29668 | 29686 | 1129 | CACATAGCAATCTTTAATC | 2332 | GATTAAAGATTGCTATGTG |
| NC_045512.2_19mer_win1_29669 | 29669 | 29687 | 1130 | ACATAGCAATCTTTAATCA | 2333 | TGATTAAAGATTGCTATGT |
| NC_045512.2_19mer_win1_29689 | 29689 | 29707 | 1131 | TGTGTAACATTAGGGAGGA | 2334 | TCCTCCCTAATGTTACACA |
| NC_045512.2_19mer_win1_29690 | 29690 | 29708 | 1132 | GTGTAACATTAGGGAGGAC | 2335 | GTCCTCCCTAATGTTACAC |
| NC_045512.2_19mer_win1_29691 | 29691 | 29709 | 1133 | TGTAACATTAGGGAGGACT | 2336 | AGTCCTCCCTAATGTTACA |
| NC_045512.2_19mer_win1_29692 | 29692 | 29710 | 1134 | GTAACATTAGGGAGGACTT | 2337 | AAGTCCTCCCTAATGTTAC |
| NC_045512.2_19mer_win1_29693 | 29693 | 29711 | 1135 | TAACATTAGGGAGGACTTG | 2338 | CAAGTCCTCCCTAATGTTA |
| NC_045512.2_19mer_win1_29694 | 29694 | 29712 | 1136 | AACATTAGGGAGGACTTGA | 2339 | TCAAGTCCTCCCTAATGTT |
| NC_045512.2_19mer_win1_29695 | 29695 | 29713 | 1137 | ACATTAGGGAGGACTTGAA | 2340 | TTCAAGTCCTCCCTAATGT |
| NC_045512.2_19mer_win1_29696 | 29696 | 29714 | 1138 | CATTAGGGAGGACTTGAAA | 2341 | TTTCAAGTCCTCCCTAATG |
| NC_045512.2_19mer_win1_29697 | 29697 | 29715 | 1139 | ATTAGGGAGGACTTGAAAG | 2342 | CTTTCAAGTCCTCCCTAAT |
| NC_045512.2_19mer_win1_29698 | 29698 | 29716 | 1140 | TTAGGGAGGACTTGAAAGA | 2343 | TCTTTCAAGTCCTCCCTAA |
| NC_045512.2_19mer_win1_29699 | 29699 | 29717 | 1141 | TAGGGAGGACTTGAAAGAG | 2344 | CTCTTTCAAGTCCTCCCTA |
| NC_045512.2_19mer_win1_29700 | 29700 | 29718 | 1142 | AGGGAGGACTTGAAAGAGC | 2345 | GCTCTTTCAAGTCCTCCCT |
| NC_045512.2_19mer_win1_29701 | 29701 | 29719 | 1143 | GGGAGGACTTGAAAGAGCC | 2346 | GGCTCTTTCAAGTCCTCCC |
| NC_045512.2_19mer_win1_29702 | 29702 | 29720 | 1144 | GGAGGACTTGAAAGAGCCA | 2347 | TGGCTCTTTCAAGTCCTCC |
| NC_045512.2_19mer_win1_29703 | 29703 | 29721 | 1145 | GAGGACTTGAAAGAGCCAC | 2348 | GTGGCTCTTTCAAGTCCTC |
| NC_045512.2_19mer_win1_29704 | 29704 | 29722 | 1146 | AGGACTTGAAAGAGCCACC | 2349 | GGTGGCTCTTTCAAGTCCT |
| NC_045512.2_19mer_win1_29705 | 29705 | 29723 | 1147 | GGACTTGAAAGAGCCACCA | 2350 | TGGTGGCTCTTTCAAGTCC |
| NC_045512.2_19mer_win1_29706 | 29706 | 29724 | 1148 | GACTTGAAAGAGCCACCAC | 2351 | GTGGTGGCTCTTTCAAGTC |
| NC_045512.2_19mer_win1_29707 | 29707 | 29725 | 1149 | ACTTGAAAGAGCCACCACA | 2352 | TGTGGTGGCTCTTTCAAGT |
| NC_045512.2_19mer_win1_29708 | 29708 | 29726 | 1150 | CTTGAAAGAGCCACCACAT | 2353 | ATGTGGTGGCTCTTTCAAG |
| NC_045512.2_19mer_win1_29709 | 29709 | 29727 | 1151 | TTGAAAGAGCCACCACATT | 2354 | AATGTGGTGGCTCTTTCAA |
| NC_045512.2_19mer_win1_29710 | 29710 | 29728 | 1152 | TGAAAGAGCCACCACATTT | 2355 | AAATGTGGTGGCTCTTTCA |
| NC_045512.2_19mer_win1_29711 | 29711 | 29729 | 1153 | GAAAGAGCCACCACATTTT | 2356 | AAAATGTGGTGGCTCTTTC |
| NC_045512.2_19mer_win1_29712 | 29712 | 29730 | 1154 | AAAGAGCCACCACATTTTC | 2357 | GAAAATGTGGTGGCTCTTT |
| NC_045512.2_19mer_win1_29713 | 29713 | 29731 | 1155 | AAGAGCCACCACATTTTCA | 2358 | TGAAAATGTGGTGGCTCTT |
| NC_045512.2_19mer_win1_29733 | 29733 | 29751 | 1156 | CGAGGCCACGCGGAGTACG | 2359 | CGTACTCCGCGTGGCCTCG |
| NC_045512.2_19mer_win1_29734 | 29734 | 29752 | 1157 | GAGGCCACGCGGAGTACGA | 2360 | TCGTACTCCGCGTGGCCTC |
| NC_045512.2_19mer_win1_29735 | 29735 | 29753 | 1158 | AGGCCACGCGGAGTACGAT | 2361 | ATCGTACTCCGCGTGGCCT |
| NC_045512.2_19mer_win1_29736 | 29736 | 29754 | 1159 | GGCCACGCGGAGTACGATC | 2362 | GATCGTACTCCGCGTGGCC |
| NC_045512.2_19mer_win1_29737 | 29737 | 29755 | 1160 | GCCACGCGGAGTACGATCG | 2363 | CGATCGTACTCCGCGTGGC |
| NC_045512.2_19mer_win1_29738 | 29738 | 29756 | 1161 | CCACGCGGAGTACGATCGA | 2364 | TCGATCGTACTCCGCGTGG |
| NC_045512.2_19mer_win1_29739 | 29739 | 29757 | 1162 | CACGCGGAGTACGATCGAG | 2365 | CTCGATCGTACTCCGCGTG |
| NC_045512.2_19mer_win1_29770 | 29770 | 29788 | 1163 | AATGCTAGGGAGAGCTGCC | 2366 | GGCAGCTCTCCCTAGCATT |
| NC_045512.2_19mer_win1_29771 | 29771 | 29789 | 1164 | ATGCTAGGGAGAGCTGCCT | 2367 | AGGCAGCTCTCCCTAGCAT |
| NC_045512.2_19mer_win1_29772 | 29772 | 29790 | 1165 | TGCTAGGGAGAGCTGCCTA | 2368 | TAGGCAGCTCTCCCTAGCA |
| NC_045512.2_19mer_win1_29773 | 29773 | 29791 | 1166 | GCTAGGGAGAGCTGCCTAT | 2369 | ATAGGCAGCTCTCCCTAGC |
| NC_045512.2_19mer_win1_29774 | 29774 | 29792 | 1167 | CTAGGGAGAGCTGCCTATA | 2370 | TATAGGCAGCTCTCCCTAG |
| NC_045512.2_19mer_win1_29775 | 29775 | 29793 | 1168 | TAGGGAGAGCTGCCTATAT | 2371 | ATATAGGCAGCTCTCCCTA |
| NC_045512.2_19mer_win1_29776 | 29776 | 29794 | 1169 | AGGGAGAGCTGCCTATATG | 2372 | CATATAGGCAGCTCTCCCT |
| NC_045512.2_19mer_win1_29777 | 29777 | 29795 | 1170 | GGGAGAGCTGCCTATATGG | 2373 | CCATATAGGCAGCTCTCCC |
| NC_045512.2_19mer_win1_29778 | 29778 | 29796 | 1171 | GGAGAGCTGCCTATATGGA | 2374 | TCCATATAGGCAGCTCTCC |
| NC_045512.2_19mer_win1_29779 | 29779 | 29797 | 1172 | GAGAGCTGCCTATATGGAA | 2375 | TTCCATATAGGCAGCTCTC |
| NC_045512.2_19mer_win1_29780 | 29780 | 29798 | 1173 | AGAGCTGCCTATATGGAAG | 2376 | CTTCCATATAGGCAGCTCT |
| NC_045512.2_19mer_win1_29781 | 29781 | 29799 | 1174 | GAGCTGCCTATATGGAAGA | 2377 | TCTTCCATATAGGCAGCTC |
| NC_045512.2_19mer_win1_29782 | 29782 | 29800 | 1175 | AGCTGCCTATATGGAAGAG | 2378 | CTCTTCCATATAGGCAGCT |
| NC_045512.2_19mer_win1_29783 | 29783 | 29801 | 1176 | GCTGCCTATATGGAAGAGC | 2379 | GCTCTTCCATATAGGCAGC |
| NC_045512.2_19mer_win1_29784 | 29784 | 29802 | 1177 | CTGCCTATATGGAAGAGCC | 2380 | GGCTCTTCCATATAGGCAG |
| NC_045512.2_19mer_win1_29785 | 29785 | 29803 | 1178 | TGCCTATATGGAAGAGCCC | 2381 | GGGCTCTTCCATATAGGCA |
| NC_045512.2_19mer_win1_29786 | 29786 | 29804 | 1179 | GCCTATATGGAAGAGCCCT | 2382 | AGGGCTCTTCCATATAGGC |
| NC_045512.2_19mer_win1_29787 | 29787 | 29805 | 1180 | CCTATATGGAAGAGCCCTA | 2383 | TAGGGCTCTTCCATATAGG |
| NC_045512.2_19mer_win1_29788 | 29788 | 29806 | 1181 | CTATATGGAAGAGCCCTAA | 2384 | TTAGGGCTCTTCCATATAG |
| NC_045512.2_19mer_win1_29789 | 29789 | 29807 | 1182 | TATATGGAAGAGCCCTAAT | 2385 | ATTAGGGCTCTTCCATATA |
| NC_045512.2_19mer_win1_29790 | 29790 | 29808 | 1183 | ATATGGAAGAGCCCTAATG | 2386 | CATTAGGGCTCTTCCATAT |
| NC_045512.2_19mer_win1_29791 | 29791 | 29809 | 1184 | TATGGAAGAGCCCTAATGT | 2387 | ACATTAGGGCTCTTCCATA |
| NC_045512.2_19mer_win1_29792 | 29792 | 29810 | 1185 | ATGGAAGAGCCCTAATGTG | 2388 | CACATTAGGGCTCTTCCAT |
| NC_045512.2_19mer_win1_29793 | 29793 | 29811 | 1186 | TGGAAGAGCCCTAATGTGT | 2389 | ACACATTAGGGCTCTTCCA |
| NC_045512.2_19mer_win1_29794 | 29794 | 29812 | 1187 | GGAAGAGCCCTAATGTGTA | 2390 | TACACATTAGGGCTCTTCC |
| NC_045512.2_19mer_win1_29795 | 29795 | 29813 | 1188 | GAAGAGCCCTAATGTGTAA | 2391 | TTACACATTAGGGCTCTTC |
| NC_045512.2_19mer_win1_29796 | 29796 | 29814 | 1189 | AAGAGCCCTAATGTGTAAA | 2392 | TTTACACATTAGGGCTCTT |
| NC_045512.2_19mer_win1_29797 | 29797 | 29815 | 1190 | AGAGCCCTAATGTGTAAAA | 2393 | TTTTACACATTAGGGCTCT |
| NC_045512.2_19mer_win1_29798 | 29798 | 29816 | 1191 | GAGCCCTAATGTGTAAAAT | 2394 | ATTTTACACATTAGGGCTC |
| NC_045512.2_19mer_win1_29799 | 29799 | 29817 | 1192 | AGCCCTAATGTGTAAAATT | 2395 | AATTTTACACATTAGGGCT |
| NC_045512.2_19mer_win1_29800 | 29800 | 29818 | 1193 | GCCCTAATGTGTAAAATTA | 2396 | TAATTTTACACATTAGGGC |
| NC_045512.2_19mer_win1_29801 | 29801 | 29819 | 1194 | CCCTAATGTGTAAAATTAA | 2397 | TTAATTTTACACATTAGGG |
| NC_045512.2_19mer_win1_29802 | 29802 | 29820 | 1195 | CCTAATGTGTAAAATTAAT | 2398 | ATTAATTTTACACATTAGG |
| NC_045512.2_19mer_win1_29803 | 29803 | 29821 | 1196 | CTAATGTGTAAAATTAATT | 2399 | AATTAATTTTACACATTAG |
| NC_045512.2_19mer_win1_29804 | 29804 | 29822 | 1197 | TAATGTGTAAAATTAATTT | 2400 | AAATTAATTTTACACATTA |
| NC_045512.2_19mer_win1_29805 | 29805 | 29823 | 1198 | AATGTGTAAAATTAATTTT | 2401 | AAAATTAATTTTACACATT |
| NC_045512.2_19mer_win1_29806 | 29806 | 29824 | 1199 | ATGTGTAAAATTAATTTTA | 2402 | TAAAATTAATTTTACACAT |
| NC_045512.2_19mer_win1_29807 | 29807 | 29825 | 1200 | TGTGTAAAATTAATTTTAG | 2403 | CTAAAATTAATTTTACACA |
| NC_045512.2_19mer_win1_29808 | 29808 | 29826 | 1201 | GTGTAAAATTAATTTTAGT | 2404 | ACTAAAATTAATTTTACAC |
| NC_045512.2_19mer_win1_29809 | 29809 | 29827 | 1202 | TGTAAAATTAATTTTAGTA | 2405 | TACTAAAATTAATTTTACA |
| NC_045512.2_19mer_win1_29810 | 29810 | 29828 | 1203 | GTAAAATTAATTTTAGTAG | 2406 | CTACTAAAATTAATTTTAC |
| 21-mer Target Sequences | | | | | | |
| NC_045512.2_21mer_win1_00190 | 190 | 210 | 2411 | GACGAATGCCAAAGCAGGCAC | 3393 | CACGGACGAAACCGTAAGCAG |
| NC_045512.2_21mer_win1_00191 | 191 | 211 | 2412 | ACGAATGCCAAAGCAGGCACA | 3394 | ACACGGACGAAACCGTAAGCA |
| NC_045512.2_21mer_win1_00192 | 192 | 212 | 2413 | CGAATGCCAAAGCAGGCACAA | 3395 | AACACGGACGAAACCGTAAGC |
| NC_045512.2_21mer_win1_00193 | 193 | 213 | 2414 | GAATGCCAAAGCAGGCACAAC | 3396 | CAACACGGACGAAACCGTAAG |
| NC_045512.2_21mer_win1_00194 | 194 | 214 | 2415 | AATGCCAAAGCAGGCACAACG | 3397 | GCAACACGGACGAAACCGTAA |
| NC_045512.2_21mer_win1_00195 | 195 | 215 | 2416 | ATGCCAAAGCAGGCACAACGT | 3398 | TGCAACACGGACGAAACCGTA |
| NC_045512.2_21mer_win1_00196 | 196 | 216 | 2417 | TGCCAAAGCAGGCACAACGTC | 3399 | CTGCAACACGGACGAAACCGT |
| NC_045512.2_21mer_win1_00233 | 233 | 253 | 2418 | GATCCAAAGCAGGCCCACACT | 3400 | TCACACCCGGACGAAACCTAG |
| NC_045512.2_21mer_win1_00234 | 234 | 254 | 2419 | ATCCAAAGCAGGCCCACACTG | 3401 | GTCACACCCGGACGAAACCTA |
| NC_045512.2_21mer_win1_00235 | 235 | 255 | 2420 | TCCAAAGCAGGCCCACACTGG | 3402 | GGTCACACCCGGACGAAACCT |
| NC_045512.2_21mer_win1_00236 | 236 | 256 | 2421 | CCAAAGCAGGCCCACACTGGC | 3403 | CGGTCACACCCGGACGAAACC |
| NC_045512.2_21mer_win1_00237 | 237 | 257 | 2422 | CAAAGCAGGCCCACACTGGCT | 3404 | TCGGTCACACCCGGACGAAAC |
| NC_045512.2_21mer_win1_00238 | 238 | 258 | 2423 | AAAGCAGGCCCACACTGGCTT | 3405 | TTCGGTCACACCCGGACGAAA |
| NC_045512.2_21mer_win1_00239 | 239 | 259 | 2424 | AAGCAGGCCCACACTGGCTTT | 3406 | TTTCGGTCACACCCGGACGAA |
| NC_045512.2_21mer_win1_00240 | 240 | 260 | 2425 | AGCAGGCCCACACTGGCTTTC | 3407 | CTTTCGGTCACACCCGGACGA |
| NC_045512.2_21mer_win1_00241 | 241 | 261 | 2426 | GCAGGCCCACACTGGCTTTCC | 3408 | CCTTTCGGTCACACCCGGACG |
| NC_045512.2_21mer_win1_00242 | 242 | 262 | 2427 | CAGGCCCACACTGGCTTTCCA | 3409 | ACCTTTCGGTCACACCCGGAC |
| NC_045512.2_21mer_win1_00243 | 243 | 263 | 2428 | AGGCCCACACTGGCTTTCCAT | 3410 | TACCTTTCGGTCACACCCGGA |
| NC_045512.2_21mer_win1_00244 | 244 | 264 | 2429 | GGCCCACACTGGCTTTCCATT | 3411 | TTACCTTTCGGTCACACCCGG |
| NC_045512.2_21mer_win1_00245 | 245 | 265 | 2430 | GCCCACACTGGCTTTCCATTC | 3412 | CTTACCTTTCGGTCACACCCG |
| NC_045512.2_21mer_win1_00246 | 246 | 266 | 2431 | CCCACACTGGCTTTCCATTCT | 3413 | TCTTACCTTTCGGTCACACCC |
| NC_045512.2_21mer_win1_00247 | 247 | 267 | 2432 | CCACACTGGCTTTCCATTCTA | 3414 | ATCTTACCTTTCGGTCACACC |
| NC_045512.2_21mer_win1_00248 | 248 | 268 | 2433 | CACACTGGCTTTCCATTCTAC | 3415 | CATCTTACCTTTCGGTCACAC |
| NC_045512.2_21mer_win1_00249 | 249 | 269 | 2434 | ACACTGGCTTTCCATTCTACC | 3416 | CCATCTTACCTTTCGGTCACA |
| NC_045512.2_21mer_win1_00250 | 250 | 270 | 2435 | CACTGGCTTTCCATTCTACCT | 3417 | TCCATCTTACCTTTCGGTCAC |
| NC_045512.2_21mer_win1_00251 | 251 | 271 | 2436 | ACTGGCTTTCCATTCTACCTC | 3418 | CTCCATCTTACCTTTCGGTCA |
| NC_045512.2_21mer_win1_00252 | 252 | 272 | 2437 | CTGGCTTTCCATTCTACCTCT | 3419 | TCTCCATCTTACCTTTCGGTC |
| NC_045512.2_21mer_win1_00253 | 253 | 273 | 2438 | TGGCTTTCCATTCTACCTCTC | 3420 | CTCTCCATCTTACCTTTCGGT |
| NC_045512.2_21mer_win1_00254 | 254 | 274 | 2439 | GGCTTTCCATTCTACCTCTCG | 3421 | GCTCTCCATCTTACCTTTCGG |
| NC_045512.2_21mer_win1_00255 | 255 | 275 | 2440 | GCTTTCCATTCTACCTCTCGG | 3422 | GGCTCTCCATCTTACCTTTCG |
| NC_045512.2_21mer_win1_00256 | 256 | 276 | 2441 | CTTTCCATTCTACCTCTCGGA | 3423 | AGGCTCTCCATCTTACCTTTC |
| NC_045512.2_21mer_win1_00257 | 257 | 277 | 2442 | TTTCCATTCTACCTCTCGGAA | 3424 | AAGGCTCTCCATCTTACCTTT |
| NC_045512.2_21mer_win1_00258 | 258 | 278 | 2443 | TTCCATTCTACCTCTCGGAAC | 3425 | CAAGGCTCTCCATCTTACCTT |
| NC_045512.2_21mer_win1_00259 | 259 | 279 | 2444 | TCCATTCTACCTCTCGGAACA | 3426 | ACAAGGCTCTCCATCTTACCT |
| NC_045512.2_21mer_win1_00288 | 288 | 308 | 2445 | AGTTGCTCTTTTGTGTGCAGG | 3427 | GGACGTGTGTTTTCTCGTTGA |
| NC_045512.2_21mer_win1_00289 | 289 | 309 | 2446 | GTTGCTCTTTTGTGTGCAGGT | 3428 | TGGACGTGTGTTTTCTCGTTG |
| NC_045512.2_21mer_win1_00290 | 290 | 310 | 2447 | TTGCTCTTTTGTGTGCAGGTT | 3429 | TTGGACGTGTGTTTTCTCGTT |
| NC_045512.2_21mer_win1_00291 | 291 | 311 | 2448 | TGCTCTTTTGTGTGCAGGTTG | 3430 | GTTGGACGTGTGTTTTCTCGT |
| NC_045512.2_21mer_win1_00292 | 292 | 312 | 2449 | GCTCTTTTGTGTGCAGGTTGA | 3431 | AGTTGGACGTGTGTTTTCTCG |
| NC_045512.2_21mer_win1_00293 | 293 | 313 | 2450 | CTCTTTTGTGTGCAGGTTGAG | 3432 | GAGTTGGACGTGTGTTTTCTC |
| NC_045512.2_21mer_win1_00294 | 294 | 314 | 2451 | TCTTTTGTGTGCAGGTTGAGT | 3433 | TGAGTTGGACGTGTGTTTTCT |
| NC_045512.2_21mer_win1_00295 | 295 | 315 | 2452 | CTTTTGTGTGCAGGTTGAGTC | 3434 | CTGAGTTGGACGTGTGTTTTC |
| NC_045512.2_21mer_win1_00296 | 296 | 316 | 2453 | TTTTGTGTGCAGGTTGAGTCA | 3435 | ACTGAGTTGGACGTGTGTTTT |
| NC_045512.2_21mer_win1_00297 | 297 | 317 | 2454 | TTTGTGTGCAGGTTGAGTCAA | 3436 | AACTGAGTTGGACGTGTGTTT |
| NC_045512.2_21mer_win1_00298 | 298 | 318 | 2455 | TTGTGTGCAGGTTGAGTCAAA | 3437 | AAACTGAGTTGGACGTGTGTT |
| NC_045512.2_21mer_win1_00299 | 299 | 319 | 2456 | TGTGTGCAGGTTGAGTCAAAC | 3438 | CAAACTGAGTTGGACGTGTGT |
| NC_045512.2_21mer_win1_00300 | 300 | 320 | 2457 | GTGTGCAGGTTGAGTCAAACG | 3439 | GCAAACTGAGTTGGACGTGTG |
| NC_045512.2_21mer_win1_00301 | 301 | 321 | 2458 | TGTGCAGGTTGAGTCAAACGG | 3440 | GGCAAACTGAGTTGGACGTGT |
| NC_045512.2_21mer_win1_00302 | 302 | 322 | 2459 | GTGCAGGTTGAGTCAAACGGA | 3441 | AGGCAAACTGAGTTGGACGTG |
| NC_045512.2_21mer_win1_00303 | 303 | 323 | 2460 | TGCAGGTTGAGTCAAACGGAC | 3442 | CAGGCAAACTGAGTTGGACGT |
| NC_045512.2_21mer_win1_00304 | 304 | 324 | 2461 | GCAGGTTGAGTCAAACGGACA | 3443 | ACAGGCAAACTGAGTTGGACG |
| NC_045512.2_21mer_win1_00455 | 455 | 475 | 2462 | GAACTTGTCGGGATACACAAG | 3444 | GAACACATAGGGCTGTTCAAG |
| NC_045512.2_21mer_win1_00456 | 456 | 476 | 2463 | AACTTGTCGGGATACACAAGT | 3445 | TGAACACATAGGGCTGTTCAA |
| NC_045512.2_21mer_win1_00457 | 457 | 477 | 2464 | ACTTGTCGGGATACACAAGTA | 3446 | ATGAACACATAGGGCTGTTCA |
| NC_045512.2_21mer_win1_00626 | 626 | 646 | 2465 | CAAGAAGAAGCATTCTTGCCA | 3447 | ACCGTTCTTACGAAGAAGAAC |
| NC_045512.2_21mer_win1_00627 | 627 | 647 | 2466 | AAGAAGAAGCATTCTTGCCAT | 3448 | TACCGTTCTTACGAAGAAGAA |
| NC_045512.2_21mer_win1_00628 | 628 | 648 | 2467 | AGAAGAAGCATTCTTGCCATT | 3449 | TTACCGTTCTTACGAAGAAGA |
| NC_045512.2_21mer_win1_00629 | 629 | 649 | 2468 | GAAGAAGCATTCTTGCCATTA | 3450 | ATTACCGTTCTTACGAAGAAG |
| NC_045512.2_21mer_win1_00630 | 630 | 650 | 2469 | AAGAAGCATTCTTGCCATTAT | 3451 | TATTACCGTTCTTACGAAGAA |
| NC_045512.2_21mer_win1_00631 | 631 | 651 | 2470 | AGAAGCATTCTTGCCATTATT | 3452 | TTATTACCGTTCTTACGAAGA |
| NC_045512.2_21mer_win1_03352 | 3352 | 3372 | 2471 | ACCAATAAATTTTGAATGACT | 3453 | TCAGTAAGTTTTAAATAACCA |
| NC_045512.2_21mer_win1_03353 | 3353 | 3373 | 2472 | CCAATAAATTTTGAATGACTG | 3454 | GTCAGTAAGTTTTAAATAACC |
| NC_045512.2_21mer_win1_03354 | 3354 | 3374 | 2473 | CAATAAATTTTGAATGACTGT | 3455 | TGTCAGTAAGTTTTAAATAAC |
| NC_045512.2_21mer_win1_03355 | 3355 | 3375 | 2474 | AATAAATTTTGAATGACTGTT | 3456 | TTGTCAGTAAGTTTTAAATAA |
| NC_045512.2_21mer_win1_03356 | 3356 | 3376 | 2475 | ATAAATTTTGAATGACTGTTA | 3457 | ATTGTCAGTAAGTTTTAAATA |
| NC_045512.2_21mer_win1_03357 | 3357 | 3377 | 2476 | TAAATTTTGAATGACTGTTAC | 3458 | CATTGTCAGTAAGTTTTAAAT |
| NC_045512.2_21mer_win1_03358 | 3358 | 3378 | 2477 | AAATTTTGAATGACTGTTACA | 3459 | ACATTGTCAGTAAGTTTTAAA |
| NC_045512.2_21mer_win1_06406 | 6406 | 6426 | 2478 | GAGACTTCTTCATCACCTTTT | 3460 | TTTTCCACTACTTCTTCAGAG |
| NC_045512.2_21mer_win1_06407 | 6407 | 6427 | 2479 | AGACTTCTTCATCACCTTTTA | 3461 | ATTTTCCACTACTTCTTCAGA |
| NC_045512.2_21mer_win1_06408 | 6408 | 6428 | 2480 | GACTTCTTCATCACCTTTTAG | 3462 | GATTTTCCACTACTTCTTCAG |
| NC_045512.2_21mer_win1_06409 | 6409 | 6429 | 2481 | ACTTCTTCATCACCTTTTAGG | 3463 | GGATTTTCCACTACTTCTTCA |
| NC_045512.2_21mer_win1_06410 | 6410 | 6430 | 2482 | CTTCTTCATCACCTTTTAGGA | 3464 | AGGATTTTCCACTACTTCTTC |
| NC_045512.2_21mer_win1_06411 | 6411 | 6431 | 2483 | TTCTTCATCACCTTTTAGGAT | 3465 | TAGGATTTTCCACTACTTCTT |
| NC_045512.2_21mer_win1_06412 | 6412 | 6432 | 2484 | TCTTCATCACCTTTTAGGATG | 3466 | GTAGGATTTTCCACTACTTCT |
| NC_045512.2_21mer_win1_06413 | 6413 | 6433 | 2485 | CTTCATCACCTTTTAGGATGG | 3467 | GGTAGGATTTTCCACTACTTC |
| NC_045512.2_21mer_win1_06461 | 6461 | 6481 | 2486 | CACTTTTGATGGCTTCAACAT | 3468 | TACAACTTCGGTAGTTTTCAC |
| NC_045512.2_21mer_win1_06462 | 6462 | 6482 | 2487 | ACTTTTGATGGCTTCAACATC | 3469 | CTACAACTTCGGTAGTTTTCA |
| NC_045512.2_21mer_win1_06463 | 6463 | 6483 | 2488 | CTTTTGATGGCTTCAACATCC | 3470 | CCTACAACTTCGGTAGTTTTC |
| NC_045512.2_21mer_win1_10484 | 10484 | 10504 | 2489 | AGTACACCATCACAACCAAAA | 3471 | AAAACCAACACTACCACATGA |
| NC_045512.2_21mer_win1_10485 | 10485 | 10505 | 2490 | GTACACCATCACAACCAAAAT | 3472 | TAAAACCAACACTACCACATG |
| NC_045512.2_21mer_win1_10486 | 10486 | 10506 | 2491 | TACACCATCACAACCAAAATT | 3473 | TTAAAACCAACACTACCACAT |
| NC_045512.2_21mer_win1_10487 | 10487 | 10507 | 2492 | ACACCATCACAACCAAAATTG | 3474 | GTTAAAACCAACACTACCACA |
| NC_045512.2_21mer_win1_10488 | 10488 | 10508 | 2493 | CACCATCACAACCAAAATTGT | 3475 | TGTTAAAACCAACACTACCAC |
| NC_045512.2_21mer_win1_10489 | 10489 | 10509 | 2494 | ACCATCACAACCAAAATTGTA | 3476 | ATGTTAAAACCAACACTACCA |
| NC_045512.2_21mer_win1_11609 | 11609 | 11629 | 2495 | CAAATAACAAAGAATCCGATA | 3477 | ATAGCCTAAGAAACAATAAAC |
| NC_045512.2_21mer_win1_11610 | 11610 | 11630 | 2496 | AAATAACAAAGAATCCGATAA | 3478 | AATAGCCTAAGAAACAATAAA |
| NC_045512.2_21mer_win1_12023 | 12023 | 12043 | 2497 | AGGTACGTCCCACGACATCTG | 3479 | GTCTACAGCACCCTGCATGGA |
| NC_045512.2_21mer_win1_12024 | 12024 | 12044 | 2498 | GGTACGTCCCACGACATCTGT | 3480 | TGTCTACAGCACCCTGCATGG |
| NC_045512.2_21mer_win1_12025 | 12025 | 12045 | 2499 | GTACGTCCCACGACATCTGTA | 3481 | ATGTCTACAGCACCCTGCATG |
| NC_045512.2_21mer_win1_12212 | 12212 | 12232 | 2500 | AGAAACTTACACCGATTTAGA | 3482 | AGATTTAGCCACATTCAAAGA |
| NC_045512.2_21mer_win1_12213 | 12213 | 12233 | 2501 | GAAACTTACACCGATTTAGAC | 3483 | CAGATTTAGCCACATTCAAAG |
| NC_045512.2_21mer_win1_12214 | 12214 | 12234 | 2502 | AAACTTACACCGATTTAGACT | 3484 | TCAGATTTAGCCACATTCAAA |
| NC_045512.2_21mer_win1_12839 | 12839 | 12859 | 2503 | TTTACCCGATCTAAGGGATTC | 3485 | CTTAGGGAATCTAGCCCATTT |
| NC_045512.2_21mer_win1_12840 | 12840 | 12860 | 2504 | TTACCCGATCTAAGGGATTCT | 3486 | TCTTAGGGAATCTAGCCCATT |
| NC_045512.2_21mer_win1_12841 | 12841 | 12861 | 2505 | TACCCGATCTAAGGGATTCTC | 3487 | CTCTTAGGGAATCTAGCCCAT |
| NC_045512.2_21mer_win1_12842 | 12842 | 12862 | 2506 | ACCCGATCTAAGGGATTCTCA | 3488 | ACTCTTAGGGAATCTAGCCCA |
| NC_045512.2_21mer_win1_12843 | 12843 | 12863 | 2507 | CCCGATCTAAGGGATTCTCAC | 3489 | CACTCTTAGGGAATCTAGCCC |
| NC_045512.2_21mer_win1_12844 | 12844 | 12864 | 2508 | CCGATCTAAGGGATTCTCACT | 3490 | TCACTCTTAGGGAATCTAGCC |
| NC_045512.2_21mer_win1_12845 | 12845 | 12865 | 2509 | CGATCTAAGGGATTCTCACTA | 3491 | ATCACTCTTAGGGAATCTAGC |
| NC_045512.2_21mer_win1_12846 | 12846 | 12866 | 2510 | GATCTAAGGGATTCTCACTAC | 3492 | CATCACTCTTAGGGAATCTAG |
| NC_045512.2_21mer_win1_12847 | 12847 | 12867 | 2511 | ATCTAAGGGATTCTCACTACC | 3493 | CCATCACTCTTAGGGAATCTA |
| NC_045512.2_21mer_win1_12885 | 12885 | 12905 | 2512 | GTCTTGACCTTGGTGGAACAT | 3494 | TACAAGGTGGTTCCAGTTCTG |
| NC_045512.2_21mer_win1_12886 | 12886 | 12906 | 2513 | TCTTGACCTTGGTGGAACATC | 3495 | CTACAAGGTGGTTCCAGTTCT |
| NC_045512.2_21mer_win1_12887 | 12887 | 12907 | 2514 | CTTGACCTTGGTGGAACATCC | 3496 | CCTACAAGGTGGTTCCAGTTC |
| NC_045512.2_21mer_win1_12888 | 12888 | 12908 | 2515 | TTGACCTTGGTGGAACATCCA | 3497 | ACCTACAAGGTGGTTCCAGTT |
| NC_045512.2_21mer_win1_12889 | 12889 | 12909 | 2516 | TGACCTTGGTGGAACATCCAA | 3498 | AACCTACAAGGTGGTTCCAGT |
| NC_045512.2_21mer_win1_12890 | 12890 | 12910 | 2517 | GACCTTGGTGGAACATCCAAA | 3499 | AAACCTACAAGGTGGTTCCAG |
| NC_045512.2_21mer_win1_12891 | 12891 | 12911 | 2518 | ACCTTGGTGGAACATCCAAAC | 3500 | CAAACCTACAAGGTGGTTCCA |
| NC_045512.2_2lmer_win1_12892 | 12892 | 12912 | 2519 | CCTTGGTGGAACATCCAAACA | 3501 | ACAAACCTACAAGGTGGTTCC |
| NC_045512.2_2lmer_win1_12893 | 12893 | 12913 | 2520 | CTTGGTGGAACATCCAAACAA | 3502 | AACAAACCTACAAGGTGGTTC |
| NC_045512.2_2lmer_win1_12894 | 12894 | 12914 | 2521 | TTGGTGGAACATCCAAACAAT | 3503 | TAACAAACCTACAAGGTGGTT |
| NC_045512.2_2lmer_win1_12895 | 12895 | 12915 | 2522 | TGGTGGAACATCCAAACAATG | 3504 | GTAACAAACCTACAAGGTGGT |
| NC_045512.2_2lmer_win1_12896 | 12896 | 12916 | 2523 | GGTGGAACATCCAAACAATGT | 3505 | TGTAACAAACCTACAAGGTGG |
| NC_045512.2_2lmer_win1_12897 | 12897 | 12917 | 2524 | GTGGAACATCCAAACAATGTC | 3506 | CTGTAACAAACCTACAAGGTG |
| NC_045512.2_2lmer_win1_12898 | 12898 | 12918 | 2525 | TGGAACATCCAAACAATGTCT | 3507 | TCTGTAACAAACCTACAAGGT |
| NC_045512.2_2lmer_win1_12899 | 12899 | 12919 | 2526 | GGAACATCCAAACAATGTCTG | 3508 | GTCTGTAACAAACCTACAAGG |
| NC_045512.2_21mer_win1_12900 | 12900 | 12920 | 2527 | GAACATCCAAACAATGTCTGT | 3509 | TGTCTGTAACAAACCTACAAG |
| NC_045512.2_2lmer_win1_12901 | 12901 | 12921 | 2528 | AACATCCAAACAATGTCTGTG | 3510 | GTGTCTGTAACAAACCTACAA |
| NC_045512.2_2lmer_win1_12902 | 12902 | 12922 | 2529 | ACATCCAAACAATGTCTGTGT | 3511 | TGTGTCTGTAACAAACCTACA |
| NC_045512.2_2lmer_win1_12903 | 12903 | 12923 | 2530 | CATCCAAACAATGTCTGTGTG | 3512 | GTGTGTCTGTAACAAACCTAC |
| NC_045512.2_2lmer_win1_12904 | 12904 | 12924 | 2531 | ATCCAAACAATGTCTGTGTGG | 3513 | GGTGTGTCTGTAACAAACCTA |
| NC_045512.2_2lmer_win1_12966 | 12966 | 12986 | 2532 | ATTTGTTGGATTTATCTCCAT | 3514 | TACCTCTATTTAGGTTGTTTA |
| NC_045512.2_2lmer_win1_12967 | 12967 | 12987 | 2533 | TTTGTTGGATTTATCTCCATA | 3515 | ATACCTCTATTTAGGTTGTTT |
| NC_045512.2_2lmer_win1_12968 | 12968 | 12988 | 2534 | TTGTTGGATTTATCTCCATAC | 3516 | CATACCTCTATTTAGGTTGTT |
| NC_045512.2_2lmer_win1_12969 | 12969 | 12989 | 2535 | TGTTGGATTTATCTCCATACC | 3517 | CCATACCTCTATTTAGGTTGT |
| NC_045512.2_2lmer_win1_12970 | 12970 | 12990 | 2536 | GTTGGATTTATCTCCATACCA | 3518 | ACCATACCTCTATTTAGGTTG |
| NC_045512.2_2lmer_win1_13151 | 13151 | 13171 | 2537 | TTCTACAACACATGTGTGTGA | 3519 | AGTGTGTGTACACAACATCTT |
| NC_045512.2_2lmer_win1_13152 | 13152 | 13172 | 2538 | TCTACAACACATGTGTGTGAC | 3520 | CAGTGTGTGTACACAACATCT |
| NC_045512.2_2lmer_win1_13153 | 13153 | 13173 | 2539 | CTACAACACATGTGTGTGACC | 3521 | CCAGTGTGTGTACACAACATC |
| NC_045512.2_2lmer_win1_13154 | 13154 | 13174 | 2540 | TACAACACATGTGTGTGACCA | 3522 | ACCAGTGTGTGTACACAACAT |
| NC_045512.2_2lmer_win1_13155 | 13155 | 13175 | 2541 | ACAACACATGTGTGTGACCAT | 3523 | TACCAGTGTGTGTACACAACA |
| NC_045512.2_21mer_win1_13156 | 13156 | 13176 | 2542 | CAACACATGTGTGTGACCATG | 3524 | GTACCAGTGTGTGTACACAAC |
| NC_045512.2_21mer_win1_13363 | 13363 | 13383 | 2543 | TTTGTGTCAGACATGGCAGAC | 3525 | CAGACGGTACAGACTGTGTTT |
| NC_045512.2_21mer_win1_13364 | 13364 | 13384 | 2544 | TTGTGTCAGACATGGCAGACG | 3526 | GCAGACGGTACAGACTGTGTT |
| NC_045512.2_21mer_win1_13365 | 13365 | 13385 | 2545 | TGTGTCAGACATGGCAGACGC | 3527 | CGCAGACGGTACAGACTGTGT |
| NC_045512.2_21mer_win1_13366 | 13366 | 13386 | 2546 | GTGTCAGACATGGCAGACGCC | 3528 | CCGCAGACGGTACAGACTGTG |
| NC_045512.2_21mer_win1_13388 | 13388 | 13408 | 2547 | TACACCTTTCCAATACCGACA | 3529 | ACAGCCATAACCTTTCCACAT |
| NC_045512.2_21mer_win1_13389 | 13389 | 13409 | 2548 | ACACCTTTCCAATACCGACAT | 3530 | TACAGCCATAACCTTTCCACA |
| NC_045512.2_21mer_win1_13390 | 13390 | 13410 | 2549 | CACCTTTCCAATACCGACATC | 3531 | CTACAGCCATAACCTTTCCAC |
| NC_045512.2_21mer_win1_13391 | 13391 | 13411 | 2550 | ACCTTTCCAATACCGACATCA | 3532 | ACTACAGCCATAACCTTTCCA |
| NC_045512.2_21mer_win1_13392 | 13392 | 13412 | 2551 | CCTTTCCAATACCGACATCAA | 3533 | AACTACAGCCATAACCTTTCC |
| NC_045512.2_21mer_win1_13393 | 13393 | 13413 | 2552 | CTTTCCAATACCGACATCAAC | 3534 | CAACTACAGCCATAACCTTTC |
| NC_045512.2_21mer_win1_13394 | 13394 | 13414 | 2553 | TTTCCAATACCGACATCAACA | 3535 | ACAACTACAGCCATAACCTTT |
| NC_045512.2_21mer_win1_13395 | 13395 | 13415 | 2554 | TTCCAATACCGACATCAACAC | 3536 | CACAACTACAGCCATAACCTT |
| NC_045512.2_21mer_win1_13396 | 13396 | 13416 | 2555 | TCCAATACCGACATCAACACT | 3537 | TCACAACTACAGCCATAACCT |
| NC_045512.2_21mer_win1_13458 | 13458 | 13478 | 2556 | GCAAAAATTTGCCCAAACGCC | 3538 | CCGCAAACCCGTTTAAAAACG |
| NC_045512.2_21mer_win1_13459 | 13459 | 13479 | 2557 | CAAAAATTTGCCCAAACGCCA | 3539 | ACCGCAAACCCGTTTAAAAAC |
| NC_045512.2_21mer_win1_13460 | 13460 | 13480 | 2558 | AAAAATTTGCCCAAACGCCAC | 3540 | CACCGCAAACCCGTTTAAAAA |
| NC_045512.2_21mer_win1_13461 | 13461 | 13481 | 2559 | AAAATTTGCCCAAACGCCACA | 3541 | ACACCGCAAACCCGTTTAAAA |
| NC_045512.2_21mer_win1_13462 | 13462 | 13482 | 2560 | AAATTTGCCCAAACGCCACAT | 3542 | TACACCGCAAACCCGTTTAAA |
| NC_045512.2_21mer_win1_13463 | 13463 | 13483 | 2561 | AATTTGCCCAAACGCCACATT | 3543 | TTACACCGCAAACCCGTTTAA |
| NC_045512.2_21mer_win1_13464 | 13464 | 13484 | 2562 | ATTTGCCCAAACGCCACATTC | 3544 | CTTACACCGCAAACCCGTTTA |
| NC_045512.2_21mer_win1_13465 | 13465 | 13485 | 2563 | TTTGCCCAAACGCCACATTCA | 3545 | ACTTACACCGCAAACCCGTTT |
| NC_045512.2_21mer_win1_13466 | 13466 | 13486 | 2564 | TTGCCCAAACGCCACATTCAC | 3546 | CACTTACACCGCAAACCCGTT |
| NC_045512.2_21mer_win1_13467 | 13467 | 13487 | 2565 | TGCCCAAACGCCACATTCACG | 3547 | GCACTTACACCGCAAACCCGT |
| NC_045512.2_21mer_win1_13468 | 13468 | 13488 | 2566 | GCCCAAACGCCACATTCACGT | 3548 | TGCACTTACACCGCAAACCCG |
| NC_045512.2_21mer_win1_13469 | 13469 | 13489 | 2567 | CCCAAACGCCACATTCACGTC | 3549 | CTGCACTTACACCGCAAACCC |
| NC_045512.2_21mer_win1_13470 | 13470 | 13490 | 2568 | CCAAACGCCACATTCACGTCG | 3550 | GCTGCACTTACACCGCAAACC |
| NC_045512.2_21mer_win1_13471 | 13471 | 13491 | 2569 | CAAACGCCACATTCACGTCGG | 3551 | GGCTGCACTTACACCGCAAAC |
| NC_045512.2_21mer_win1_13472 | 13472 | 13492 | 2570 | AAACGCCACATTCACGTCGGG | 3552 | GGGCTGCACTTACACCGCAAA |
| NC_045512.2_21mer_win1_13473 | 13473 | 13493 | 2571 | AACGCCACATTCACGTCGGGC | 3553 | CGGGCTGCACTTACACCGCAA |
| NC_045512.2_21mer_win1_13474 | 13474 | 13494 | 2572 | ACGCCACATTCACGTCGGGCA | 3554 | ACGGGCTGCACTTACACCGCA |
| NC_045512.2_21mer_win1_13475 | 13475 | 13495 | 2573 | CGCCACATTCACGTCGGGCAG | 3555 | GACGGGCTGCACTTACACCGC |
| NC_045512.2_21mer_win1_13476 | 13476 | 13496 | 2574 | GCCACATTCACGTCGGGCAGA | 3556 | AGACGGGCTGCACTTACACCG |
| NC_045512.2_21mer_win1_13477 | 13477 | 13497 | 2575 | CCACATTCACGTCGGGCAGAA | 3557 | AAGACGGGCTGCACTTACACC |
| NC_045512.2_21mer_win1_13478 | 13478 | 13498 | 2576 | CACATTCACGTCGGGCAGAAT | 3558 | TAAGACGGGCTGCACTTACAC |
| NC_045512.2_21mer_win1_13479 | 13479 | 13499 | 2577 | ACATTCACGTCGGGCAGAATG | 3559 | GTAAGACGGGCTGCACTTACA |
| NC_045512.2_21mer_win1_13480 | 13480 | 13500 | 2578 | CATTCACGTCGGGCAGAATGT | 3560 | TGTAAGACGGGCTGCACTTAC |
| NC_045512.2_21mer_win1_13481 | 13481 | 13501 | 2579 | ATTCACGTCGGGCAGAATGTG | 3561 | GTGTAAGACGGGCTGCACTTA |
| NC_045512.2_21mer_win1_13482 | 13482 | 13502 | 2580 | TTCACGTCGGGCAGAATGTGG | 3562 | GGTGTAAGACGGGCTGCACTT |
| NC_045512.2_21mer_win1_13483 | 13483 | 13503 | 2581 | TCACGTCGGGCAGAATGTGGC | 3563 | CGGTGTAAGACGGGCTGCACT |
| NC_045512.2_21mer_win1_13484 | 13484 | 13504 | 2582 | CACGTCGGGCAGAATGTGGCA | 3564 | ACGGTGTAAGACGGGCTGCAC |
| NC_045512.2_21mer_win1_13485 | 13485 | 13505 | 2583 | ACGTCGGGCAGAATGTGGCAC | 3565 | CACGGTGTAAGACGGGCTGCA |
| NC_045512.2_21mer_win1_13486 | 13486 | 13506 | 2584 | CGTCGGGCAGAATGTGGCACG | 3566 | GCACGGTGTAAGACGGGCTGC |
| NC_045512.2_21mer_win1_13487 | 13487 | 13507 | 2585 | GTCGGGCAGAATGTGGCACGC | 3567 | CGCACGGTGTAAGACGGGCTG |
| NC_045512.2_21mer_win1_13488 | 13488 | 13508 | 2586 | TCGGGCAGAATGTGGCACGCC | 3568 | CCGCACGGTGTAAGACGGGCT |
| NC_045512.2_21mer_win1_13489 | 13489 | 13509 | 2587 | CGGGCAGAATGTGGCACGCCG | 3569 | GCCGCACGGTGTAAGACGGGC |
| NC_045512.2_21mer_win1_13490 | 13490 | 13510 | 2588 | GGGCAGAATGTGGCACGCCGT | 3570 | TGCCGCACGGTGTAAGACGGG |
| NC_045512.2_21mer_win1_13491 | 13491 | 13511 | 2589 | GGCAGAATGTGGCACGCCGTG | 3571 | GTGCCGCACGGTGTAAGACGG |
| NC_045512.2_21mer_win1_13492 | 13492 | 13512 | 2590 | GCAGAATGTGGCACGCCGTGT | 3572 | TGTGCCGCACGGTGTAAGACG |
| NC_045512.2_21mer_win1_13493 | 13493 | 13513 | 2591 | CAGAATGTGGCACGCCGTGTC | 3573 | CTGTGCCGCACGGTGTAAGAC |
| NC_045512.2_21mer_win1_13494 | 13494 | 13514 | 2592 | AGAATGTGGCACGCCGTGTCC | 3574 | CCTGTGCCGCACGGTGTAAGA |
| NC_045512.2_21mer_win1_13495 | 13495 | 13515 | 2593 | GAATGTGGCACGCCGTGTCCG | 3575 | GCCTGTGCCGCACGGTGTAAG |
| NC_045512.2_21mer_win1_13496 | 13496 | 13516 | 2594 | AATGTGGCACGCCGTGTCCGT | 3576 | TGCCTGTGCCGCACGGTGTAA |
| NC_045512.2_21mer_win1_13497 | 13497 | 13517 | 2595 | ATGTGGCACGCCGTGTCCGTG | 3577 | GTGCCTGTGCCGCACGGTGTA |
| NC_045512.2_21mer_win1_13498 | 13498 | 13518 | 2596 | TGTGGCACGCCGTGTCCGTGA | 3578 | AGTGCCTGTGCCGCACGGTGT |
| NC_045512.2_21mer_win1_13499 | 13499 | 13519 | 2597 | GTGGCACGCCGTGTCCGTGAT | 3579 | TAGTGCCTGTGCCGCACGGTG |
| NC_045512.2_21mer_win1_13500 | 13500 | 13520 | 2598 | TGGCACGCCGTGTCCGTGATC | 3580 | CTAGTGCCTGTGCCGCACGGT |
| NC_045512.2_21mer_win1_13762 | 13762 | 13782 | 2599 | CCACTGTACCATGGTGTATAT | 3581 | TATATGTGGTACCATGTCACC |
| NC_045512.2_21mer_win1_13763 | 13763 | 13783 | 2600 | CACTGTACCATGGTGTATATA | 3582 | ATATATGTGGTACCATGTCAC |
| NC_045512.2_21mer_win1_13764 | 13764 | 13784 | 2601 | ACTGTACCATGGTGTATATAG | 3583 | GATATATGTGGTACCATGTCA |
| NC_045512.2_21mer_win1_13765 | 13765 | 13785 | 2602 | CTGTACCATGGTGTATATAGT | 3584 | TGATATATGTGGTACCATGTC |
| NC_045512.2_21mer_win1_13766 | 13766 | 13786 | 2603 | TGTACCATGGTGTATATAGTG | 3585 | GTGATATATGTGGTACCATGT |
| NC_045512.2_21mer_win1_13767 | 13767 | 13787 | 2604 | GTACCATGGTGTATATAGTGC | 3586 | CGTGATATATGTGGTACCATG |
| NC_045512.2_21mer_win1_13768 | 13768 | 13788 | 2605 | TACCATGGTGTATATAGTGCA | 3587 | ACGTGATATATGTGGTACCAT |
| NC_045512.2_21mer_win1_13769 | 13769 | 13789 | 2606 | ACCATGGTGTATATAGTGCAG | 3588 | GACGTGATATATGTGGTACCA |
| NC_045512.2_21mer_win1_13770 | 13770 | 13790 | 2607 | CCATGGTGTATATAGTGCAGT | 3589 | TGACGTGATATATGTGGTACC |
| NC_045512.2_21mer_win1_14290 | 14290 | 14310 | 2608 | CTGGCAATAAAATTTATAACC | 3590 | CCAATATTTAAAATAACGGTC |
| NC_045512.2_21mer_win1_14291 | 14291 | 14311 | 2609 | TGGCAATAAAATTTATAACCC | 3591 | CCCAATATTTAAAATAACGGT |
| NC_045512.2_21mer_win1_14292 | 14292 | 14312 | 2610 | GGCAATAAAATTTATAACCCT | 3592 | TCCCAATATTTAAAATAACGG |
| NC_045512.2_21mer_win1_14404 | 14404 | 14424 | 2611 | GGTGGATGTTCAAAACCTGGT | 3593 | TGGTCCAAAACTTGTAGGTGG |
| NC_045512.2_2lmer_win1_14405 | 14405 | 14425 | 2612 | GTGGATGTTCAAAACCTGGTG | 3594 | GTGGTCCAAAACTTGTAGGTG |
| NC_045512.2_21mer_win1_14406 | 14406 | 14426 | 2613 | TGGATGTTCAAAACCTGGTGA | 3595 | AGTGGTCCAAAACTTGTAGGT |
| NC_045512.2_21mer_win1_14407 | 14407 | 14427 | 2614 | GGATGTTCAAAACCTGGTGAT | 3596 | TAGTGGTCCAAAACTTGTAGG |
| NC_045512.2_2lmer_win1_14408 | 14408 | 14428 | 2615 | GATGTTCAAAACCTGGTGATC | 3597 | CTAGTGGTCCAAAACTTGTAG |
| NC_045512.2_2lmer_win1_14409 | 14409 | 14429 | 2616 | ATGTTCAAAACCTGGTGATCA | 3598 | ACTAGTGGTCCAAAACTTGTA |
| NC_045512.2_2lmer_win1_14500 | 14500 | 14520 | 2617 | CATGTATTAGTCCTACATTTG | 3599 | GTTTACATCCTGATTATGTAC |
| NC_045512.2_2lmer_win1_14501 | 14501 | 14521 | 2618 | ATGTATTAGTCCTACATTTGA | 3600 | AGTTTACATCCTGATTATGTA |
| NC_045512.2_2lmer_win1_14502 | 14502 | 14522 | 2619 | TGTATTAGTCCTACATTTGAA | 3601 | AAGTTTACATCCTGATTATGT |
| NC_045512.2_2lmer_win1_14503 | 14503 | 14523 | 2620 | GTATTAGTCCTACATTTGAAT | 3602 | TAAGTTTACATCCTGATTATG |
| NC_045512.2_2lmer_win1_14504 | 14504 | 14524 | 2621 | TATTAGTCCTACATTTGAATG | 3603 | GTAAGTTTACATCCTGATTAT |
| NC_045512.2_2lmer_win1_14505 | 14505 | 14525 | 2622 | ATTAGTCCTACATTTGAATGT | 3604 | TGTAAGTTTACATCCTGATTA |
| NC_045512.2_2lmer_win1_14506 | 14506 | 14526 | 2623 | TTAGTCCTACATTTGAATGTA | 3605 | ATGTAAGTTTACATCCTGATT |
| NC_045512.2_2lmer_win1_14507 | 14507 | 14527 | 2624 | TAGTCCTACATTTGAATGTAT | 3606 | TATGTAAGTTTACATCCTGAT |
| NC_045512.2_2lmer_win1_14508 | 14508 | 14528 | 2625 | AGTCCTACATTTGAATGTATC | 3607 | CTATGTAAGTTTACATCCTGA |
| NC_045512.2_2lmer_win1_14509 | 14509 | 14529 | 2626 | GTCCTACATTTGAATGTATCG | 3608 | GCTATGTAAGTTTACATCCTG |
| NC_045512.2_2lmer_win1_14510 | 14510 | 14530 | 2627 | TCCTACATTTGAATGTATCGA | 3609 | AGCTATGTAAGTTTACATCCT |
| NC_045512.2_2lmer_win1_14511 | 14511 | 14531 | 2628 | CCTACATTTGAATGTATCGAG | 3610 | GAGCTATGTAAGTTTACATCC |
| NC_045512.2_2lmer_win1_14650 | 14650 | 14670 | 2629 | TTACAACGAAAAGTTTGACAG | 3611 | GACAGTTTGAAAAGCAACATT |
| NC_045512.2_2lmer_win1_14651 | 14651 | 14671 | 2630 | TACAACGAAAAGTTTGACAGT | 3612 | TGACAGTTTGAAAAGCAACAT |
| NC_045512.2_2lmer_win1_14652 | 14652 | 14672 | 2631 | ACAACGAAAAGTTTGACAGTT | 3613 | TTGACAGTTTGAAAAGCAACA |
| NC_045512.2_2lmer_win1_14653 | 14653 | 14673 | 2632 | CAACGAAAAGTTTGACAGTTT | 3614 | TTTGACAGTTTGAAAAGCAAC |
| NC_045512.2_2lmer_win1_14654 | 14654 | 14674 | 2633 | AACGAAAAGTTTGACAGTTTG | 3615 | GTTTGACAGTTTGAAAAGCAA |
| NC_045512.2_21mer_win1_14655 | 14655 | 14675 | 2634 | ACGAAAAGTTTGACAGTTTGG | 3616 | GGTTTGACAGTTTGAAAAGCA |
| NC_045512.2_21mer_win1_14656 | 14656 | 14676 | 2635 | CGAAAAGTTTGACAGTTTGGG | 3617 | GGGTTTGACAGTTTGAAAAGC |
| NC_045512.2_21mer_win1_14657 | 14657 | 14677 | 2636 | GAAAAGTTTGACAGTTTGGGC | 3618 | CGGGTTTGACAGTTTGAAAAG |
| NC_045512.2_21mer_win1_14658 | 14658 | 14678 | 2637 | AAAAGTTTGACAGTTTGGGCC | 3619 | CCGGGTTTGACAGTTTGAAAA |
| NC_045512.2_21mer_win1_14659 | 14659 | 14679 | 2638 | AAAGTTTGACAGTTTGGGCCA | 3620 | ACCGGGTTTGACAGTTTGAAA |
| NC_045512.2_21mer_win1_14660 | 14660 | 14680 | 2639 | AAGTTTGACAGTTTGGGCCAT | 3621 | TACCGGGTTTGACAGTTTGAA |
| NC_045512.2_21mer_win1_14661 | 14661 | 14681 | 2640 | AGTTTGACAGTTTGGGCCATT | 3622 | TTACCGGGTTTGACAGTTTGA |
| NC_045512.2_21mer_win1_14662 | 14662 | 14682 | 2641 | GTTTGACAGTTTGGGCCATTA | 3623 | ATTACCGGGTTTGACAGTTTG |
| NC_045512.2_21mer_win1_14663 | 14663 | 14683 | 2642 | TTTGACAGTTTGGGCCATTAA | 3624 | AATTACCGGGTTTGACAGTTT |
| NC_045512.2_21mer_win1_14664 | 14664 | 14684 | 2643 | TTGACAGTTTGGGCCATTAAA | 3625 | AAATTACCGGGTTTGACAGTT |
| NC_045512.2_21mer_win1_14665 | 14665 | 14685 | 2644 | TGACAGTTTGGGCCATTAAAA | 3626 | AAAATTACCGGGTTTGACAGT |
| NC_045512.2_21mer_win1_14666 | 14666 | 14686 | 2645 | GACAGTTTGGGCCATTAAAAT | 3627 | TAAAATTACCGGGTTTGACAG |
| NC_045512.2_21mer_win1_14667 | 14667 | 14687 | 2646 | ACAGTTTGGGCCATTAAAATT | 3628 | TTAAAATTACCGGGTTTGACA |
| NC_045512.2_21mer_win1_14722 | 14722 | 14742 | 2647 | AAGAAATTCCTTCCTTCAAGA | 3629 | AGAACTTCCTTCCTTAAAGAA |
| NC_045512.2_21mer_win1_14723 | 14723 | 14743 | 2648 | AGAAATTCCTTCCTTCAAGAC | 3630 | CAGAACTTCCTTCCTTAAAGA |
| NC_045512.2_21mer_win1_14724 | 14724 | 14744 | 2649 | GAAATTCCTTCCTTCAAGACA | 3631 | ACAGAACTTCCTTCCTTAAAG |
| NC_045512.2_21mer_win1_14725 | 14725 | 14745 | 2650 | AAATTCCTTCCTTCAAGACAA | 3632 | AACAGAACTTCCTTCCTTAAA |
| NC_045512.2_21mer_win1_14726 | 14726 | 14746 | 2651 | AATTCCTTCCTTCAAGACAAC | 3633 | CAACAGAACTTCCTTCCTTAA |
| NC_045512.2_21mer_win1_14727 | 14727 | 14747 | 2652 | ATTCCTTCCTTCAAGACAACT | 3634 | TCAACAGAACTTCCTTCCTTA |
| NC_045512.2_21mer_win1_14728 | 14728 | 14748 | 2653 | TTCCTTCCTTCAAGACAACTT | 3635 | TTCAACAGAACTTCCTTCCTT |
| NC_045512.2_21mer_win1_14750 | 14750 | 14770 | 2654 | ATTTTGTGAAGAAGAAACGAG | 3636 | GAGCAAAGAAGAAGTGTTTTA |
| NC_045512.2_21mer_win1_14751 | 14751 | 14771 | 2655 | TTTTGTGAAGAAGAAACGAGT | 3637 | TGAGCAAAGAAGAAGTGTTTT |
| NC_045512.2_21mer_win1_14752 | 14752 | 14772 | 2656 | TTTGTGAAGAAGAAACGAGTC | 3638 | CTGAGCAAAGAAGAAGTGTTT |
| NC_045512.2_21mer_win1_14753 | 14753 | 14773 | 2657 | TTGTGAAGAAGAAACGAGTCC | 3639 | CCTGAGCAAAGAAGAAGTGTT |
| NC_045512.2_21mer_win1_14754 | 14754 | 14774 | 2658 | TGTGAAGAAGAAACGAGTCCT | 3640 | TCCTGAGCAAAGAAGAAGTGT |
| NC_045512.2_21mer_win1_14755 | 14755 | 14775 | 2659 | GTGAAGAAGAAACGAGTCCTA | 3641 | ATCCTGAGCAAAGAAGAAGTG |
| NC_045512.2_21mer_win1_14756 | 14756 | 14776 | 2660 | TGAAGAAGAAACGAGTCCTAC | 3642 | CATCCTGAGCAAAGAAGAAGT |
| NC_045512.2_21mer_win1_14757 | 14757 | 14777 | 2661 | GAAGAAGAAACGAGTCCTACC | 3643 | CCATCCTGAGCAAAGAAGAAG |
| NC_045512.2_21mer_win1_14821 | 14821 | 14841 | 2662 | GGTTGTTACACACTATAGTCT | 3644 | TCTGATATCACACATTGTTGG |
| NC_045512.2_21mer_win1_14822 | 14822 | 14842 | 2663 | GTTGTTACACACTATAGTCTG | 3645 | GTCTGATATCACACATTGTTG |
| NC_045512.2_21mer_win1_14823 | 14823 | 14843 | 2664 | TTGTTACACACTATAGTCTGT | 3646 | TGTCTGATATCACACATTGTT |
| NC_045512.2_21mer_win1_14824 | 14824 | 14844 | 2665 | TGTTACACACTATAGTCTGTT | 3647 | TTGTCTGATATCACACATTGT |
| NC_045512.2_21mer_win1_14825 | 14825 | 14845 | 2666 | GTTACACACTATAGTCTGTTG | 3648 | GTTGTCTGATATCACACATTG |
| NC_045512.2_21mer_win1_14826 | 14826 | 14846 | 2667 | TTACACACTATAGTCTGTTGA | 3649 | AGTTGTCTGATATCACACATT |
| NC_045512.2_21mer_win1_14875 | 14875 | 14895 | 2668 | ATGAAACTAACAATGCTACCA | 3650 | ACCATCGTAACAATCAAAGTA |
| NC_045512.2_21mer_win1_14876 | 14876 | 14896 | 2669 | TGAAACTAACAATGCTACCAC | 3651 | CACCATCGTAACAATCAAAGT |
| NC_045512.2_21mer_win1_14877 | 14877 | 14897 | 2670 | GAAACTAACAATGCTACCACC | 3652 | CCACCATCGTAACAATCAAAG |
| NC_045512.2_21mer_win1_14878 | 14878 | 14898 | 2671 | AAACTAACAATGCTACCACCG | 3653 | GCCACCATCGTAACAATCAAA |
| NC_045512.2_21mer_win1_14879 | 14879 | 14899 | 2672 | AACTAACAATGCTACCACCGA | 3654 | AGCCACCATCGTAACAATCAA |
| NC_045512.2_21mer_win1_14880 | 14880 | 14900 | 2673 | ACTAACAATGCTACCACCGAC | 3655 | CAGCCACCATCGTAACAATCA |
| NC_045512.2_21mer_win1_14881 | 14881 | 14901 | 2674 | CTAACAATGCTACCACCGACA | 3656 | ACAGCCACCATCGTAACAATC |
| NC_045512.2_21mer_win1_14882 | 14882 | 14902 | 2675 | TAACAATGCTACCACCGACAT | 3657 | TACAGCCACCATCGTAACAAT |
| NC_045512.2_21mer_win1_14883 | 14883 | 14903 | 2676 | AACAATGCTACCACCGACATA | 3658 | ATACAGCCACCATCGTAACAA |
| NC_045512.2_21mer_win1_14962 | 14962 | 14982 | 2677 | TTTACCCCATTCCGATCTGAA | 3659 | AAGTCTAGCCTTACCCCATTT |
| NC_045512.2_21mer_win1_14963 | 14963 | 14983 | 2678 | TTACCCCATTCCGATCTGAAA | 3660 | AAAGTCTAGCCTTACCCCATT |
| NC_045512.2_21mer_win1_14964 | 14964 | 14984 | 2679 | TACCCCATTCCGATCTGAAAT | 3661 | TAAAGTCTAGCCTTACCCCAT |
| NC_045512.2_21mer_win1_14965 | 14965 | 14985 | 2680 | ACCCCATTCCGATCTGAAATA | 3662 | ATAAAGTCTAGCCTTACCCCA |
| NC_045512.2_21mer_win1_14966 | 14966 | 14986 | 2681 | CCCCATTCCGATCTGAAATAA | 3663 | AATAAAGTCTAGCCTTACCCC |
| NC_045512.2_21mer_win1_14967 | 14967 | 14987 | 2682 | CCCATTCCGATCTGAAATAAT | 3664 | TAATAAAGTCTAGCCTTACCC |
| NC_045512.2_21mer_win1_14968 | 14968 | 14988 | 2683 | CCATTCCGATCTGAAATAATA | 3665 | ATAATAAAGTCTAGCCTTACC |
| NC_045512.2_21mer_win1_14969 | 14969 | 14989 | 2684 | CATTCCGATCTGAAATAATAC | 3666 | CATAATAAAGTCTAGCCTTAC |
| NC_045512.2_21mer_win1_14970 | 14970 | 14990 | 2685 | ATTCCGATCTGAAATAATACT | 3667 | TCATAATAAAGTCTAGCCTTA |
| NC_045512.2_21mer_win1_14992 | 14992 | 15012 | 2686 | AGTTACTCAATACTCCTAGTT | 3668 | TTGATCCTCATAACTCATTGA |
| NC_045512.2_21mer_win1_14993 | 14993 | 15013 | 2687 | GTTACTCAATACTCCTAGTTC | 3669 | CTTGATCCTCATAACTCATTG |
| NC_045512.2_21mer_win1_14994 | 14994 | 15014 | 2688 | TTACTCAATACTCCTAGTTCT | 3670 | TCTTGATCCTCATAACTCATT |
| NC_045512.2_21mer_win1_14995 | 14995 | 15015 | 2689 | TACTCAATACTCCTAGTTCTA | 3671 | ATCTTGATCCTCATAACTCAT |
| NC_045512.2_21mer_win1_14996 | 14996 | 15016 | 2690 | ACTCAATACTCCTAGTTCTAC | 3672 | CATCTTGATCCTCATAACTCA |
| NC_045512.2_21mer_win1_14997 | 14997 | 15017 | 2691 | CTCAATACTCCTAGTTCTACG | 3673 | GCATCTTGATCCTCATAACTC |
| NC_045512.2_21mer_win1_14998 | 14998 | 15018 | 2692 | TCAATACTCCTAGTTCTACGT | 3674 | TGCATCTTGATCCTCATAACT |
| NC_045512.2_21mer_win1_14999 | 14999 | 15019 | 2693 | CAATACTCCTAGTTCTACGTG | 3675 | GTGCATCTTGATCCTCATAAC |
| NC_045512.2_21mer_win1_15000 | 15000 | 15020 | 2694 | AATACTCCTAGTTCTACGTGA | 3676 | AGTGCATCTTGATCCTCATAA |
| NC_045512.2_21mer_win1_15055 | 15055 | 15075 | 2695 | TATTGAGTTTACTTAGAATTC | 3677 | CTTAAGATTCATTTGAGTTAT |
| NC_045512.2_21mer_win1_15056 | 15056 | 15076 | 2696 | ATTGAGTTTACTTAGAATTCA | 3678 | ACTTAAGATTCATTTGAGTTA |
| NC_045512.2_21mer_win1_15057 | 15057 | 15077 | 2697 | TTGAGTTTACTTAGAATTCAT | 3679 | TACTTAAGATTCATTTGAGTT |
| NC_045512.2_21mer_win1_15058 | 15058 | 15078 | 2698 | TGAGTTTACTTAGAATTCATA | 3680 | ATACTTAAGATTCATTTGAGT |
| NC_045512.2_21mer_win1_15059 | 15059 | 15079 | 2699 | GAGTTTACTTAGAATTCATAC | 3681 | CATACTTAAGATTCATTTGAG |
| NC_045512.2_21mer_win1_15060 | 15060 | 15080 | 2700 | AGTTTACTTAGAATTCATACG | 3682 | GCATACTTAAGATTCATTTGA |
| NC_045512.2_21mer_win1_15061 | 15061 | 15081 | 2701 | GTTTACTTAGAATTCATACGG | 3683 | GGCATACTTAAGATTCATTTG |
| NC_045512.2_21mer_win1_15062 | 15062 | 15082 | 2702 | TTTACTTAGAATTCATACGGT | 3684 | TGGCATACTTAAGATTCATTT |
| NC_045512.2_2lmer_win1_15063 | 15063 | 15083 | 2703 | TTACTTAGAATTCATACGGTA | 3685 | ATGGCATACTTAAGATTCATT |
| NC_045512.2_2lmer_win1_15064 | 15064 | 15084 | 2704 | TACTTAGAATTCATACGGTAA | 3686 | AATGGCATACTTAAGATTCAT |
| NC_045512.2_2lmer_win1_15065 | 15065 | 15085 | 2705 | ACTTAGAATTCATACGGTAAT | 3687 | TAATGGCATACTTAAGATTCA |
| NC_045512.2_2lmer_win1_15066 | 15066 | 15086 | 2706 | CTTAGAATTCATACGGTAATC | 3688 | CTAATGGCATACTTAAGATTC |
| NC_045512.2_2lmer_win1_15067 | 15067 | 15087 | 2707 | TTAGAATTCATACGGTAATCA | 3689 | ACTAATGGCATACTTAAGATT |
| NC_045512.2_2lmer_win1_15068 | 15068 | 15088 | 2708 | TAGAATTCATACGGTAATCAC | 3690 | CACTAATGGCATACTTAAGAT |
| NC_045512.2_2lmer_win1_15069 | 15069 | 15089 | 2709 | AGAATTCATACGGTAATCACG | 3691 | GCACTAATGGCATACTTAAGA |
| NC_045512.2_2lmer_win1_15070 | 15070 | 15090 | 2710 | GAATTCATACGGTAATCACGT | 3692 | TGCACTAATGGCATACTTAAG |
| NC_045512.2_2lmer_win1_15071 | 15071 | 15091 | 2711 | AATTCATACGGTAATCACGTT | 3693 | TTGCACTAATGGCATACTTAA |
| NC_045512.2_2lmer_win1_15072 | 15072 | 15092 | 2712 | ATTCATACGGTAATCACGTTT | 3694 | TTTGCACTAATGGCATACTTA |
| NC_045512.2_2lmer_win1_15073 | 15073 | 15093 | 2713 | TTCATACGGTAATCACGTTTC | 3695 | CTTTGCACTAATGGCATACTT |
| NC_045512.2_2lmer_win1_15074 | 15074 | 15094 | 2714 | TCATACGGTAATCACGTTTCT | 3696 | TCTTTGCACTAATGGCATACT |
| NC_045512.2_2lmer_win1_15075 | 15075 | 15095 | 2715 | CATACGGTAATCACGTTTCTT | 3697 | TTCTTTGCACTAATGGCATAC |
| NC_045512.2_2lmer_win1_15076 | 15076 | 15096 | 2716 | ATACGGTAATCACGTTTCTTA | 3698 | ATTCTTTGCACTAATGGCATA |
| NC_045512.2_2lmer_win1_15077 | 15077 | 15097 | 2717 | TACGGTAATCACGTTTCTTAT | 3699 | TATTCTTTGCACTAATGGCAT |
| NC_045512.2_2lmer_win1_15078 | 15078 | 15098 | 2718 | ACGGTAATCACGTTTCTTATC | 3700 | CTATTCTTTGCACTAATGGCA |
| NC_045512.2_2lmer_win1_15079 | 15079 | 15099 | 2719 | CGGTAATCACGTTTCTTATCT | 3701 | TCTATTCTTTGCACTAATGGC |
| NC_045512.2_2lmer_win1_15080 | 15080 | 15100 | 2720 | GGTAATCACGTTTCTTATCTC | 3702 | CTCTATTCTTTGCACTAATGG |
| NC_045512.2_2lmer_win1_15081 | 15081 | 15101 | 2721 | GTAATCACGTTTCTTATCTCG | 3703 | GCTCTATTCTTTGCACTAATG |
| NC_045512.2_2lmer_win1_15082 | 15082 | 15102 | 2722 | TAATCACGTTTCTTATCTCGA | 3704 | AGCTCTATTCTTTGCACTAAT |
| NC_045512.2_2lmer_win1_15083 | 15083 | 15103 | 2723 | AATCACGTTTCTTATCTCGAG | 3705 | GAGCTCTATTCTTTGCACTAA |
| NC_045512.2_2lmer_win1_15084 | 15084 | 15104 | 2724 | ATCACGTTTCTTATCTCGAGC | 3706 | CGAGCTCTATTCTTTGCACTA |
| NC_045512.2_2lmer_win1_15085 | 15085 | 15105 | 2725 | TCACGTTTCTTATCTCGAGCG | 3707 | GCGAGCTCTATTCTTTGCACT |
| NC_045512.2_21mer_win1_15086 | 15086 | 15106 | 2726 | CACGTTTCTTATCTCGAGCGT | 3708 | TGCGAGCTCTATTCTTTGCAC |
| NC_045512.2_21mer_win1_15087 | 15087 | 15107 | 2727 | ACGTTTCTTATCTCGAGCGTG | 3709 | GTGCGAGCTCTATTCTTTGCA |
| NC_045512.2_21mer_win1_15088 | 15088 | 15108 | 2728 | CGTTTCTTATCTCGAGCGTGG | 3710 | GGTGCGAGCTCTATTCTTTGC |
| NC_045512.2_21mer_win1_15089 | 15089 | 15109 | 2729 | GTTTCTTATCTCGAGCGTGGC | 3711 | CGGTGCGAGCTCTATTCTTTG |
| NC_045512.2_21mer_win1_15090 | 15090 | 15110 | 2730 | TTTCTTATCTCGAGCGTGGCA | 3712 | ACGGTGCGAGCTCTATTCTTT |
| NC_045512.2_21mer_win1_15091 | 15091 | 15111 | 2731 | TTCTTATCTCGAGCGTGGCAT | 3713 | TACGGTGCGAGCTCTATTCTT |
| NC_045512.2_21mer_win1_15092 | 15092 | 15112 | 2732 | TCTTATCTCGAGCGTGGCATC | 3714 | CTACGGTGCGAGCTCTATTCT |
| NC_045512.2_21mer_win1_15093 | 15093 | 15113 | 2733 | CTTATCTCGAGCGTGGCATCG | 3715 | GCTACGGTGCGAGCTCTATTC |
| NC_045512.2_21mer_win1_15094 | 15094 | 15114 | 2734 | TTATCTCGAGCGTGGCATCGA | 3716 | AGCTACGGTGCGAGCTCTATT |
| NC_045512.2_21mer_win1_15095 | 15095 | 15115 | 2735 | TATCTCGAGCGTGGCATCGAC | 3717 | CAGCTACGGTGCGAGCTCTAT |
| NC_045512.2_21mer_win1_15096 | 15096 | 15116 | 2736 | ATCTCGAGCGTGGCATCGACC | 3718 | CCAGCTACGGTGCGAGCTCTA |
| NC_045512.2_21mer_win1_15097 | 15097 | 15117 | 2737 | TCTCGAGCGTGGCATCGACCA | 3719 | ACCAGCTACGGTGCGAGCTCT |
| NC_045512.2_21mer_win1_15098 | 15098 | 15118 | 2738 | CTCGAGCGTGGCATCGACCAC | 3720 | CACCAGCTACGGTGCGAGCTC |
| NC_045512.2_21mer_win1_15099 | 15099 | 15119 | 2739 | TCGAGCGTGGCATCGACCACA | 3721 | ACACCAGCTACGGTGCGAGCT |
| NC_045512.2_21mer_win1_15100 | 15100 | 15120 | 2740 | CGAGCGTGGCATCGACCACAG | 3722 | GACACCAGCTACGGTGCGAGC |
| NC_045512.2_21mer_win1_15101 | 15101 | 15121 | 2741 | GAGCGTGGCATCGACCACAGA | 3723 | AGACACCAGCTACGGTGCGAG |
| NC_045512.2_21mer_win1_15102 | 15102 | 15122 | 2742 | AGCGTGGCATCGACCACAGAG | 3724 | GAGACACCAGCTACGGTGCGA |
| NC_045512.2_21mer_win1_15103 | 15103 | 15123 | 2743 | GCGTGGCATCGACCACAGAGA | 3725 | AGAGACACCAGCTACGGTGCG |
| NC_045512.2_21mer_win1_15104 | 15104 | 15124 | 2744 | CGTGGCATCGACCACAGAGAT | 3726 | TAGAGACACCAGCTACGGTGC |
| NC_045512.2_21mer_win1_15105 | 15105 | 15125 | 2745 | GTGGCATCGACCACAGAGATA | 3727 | ATAGAGACACCAGCTACGGTG |
| NC_045512.2_21mer_win1_15106 | 15106 | 15126 | 2746 | TGGCATCGACCACAGAGATAG | 3728 | GATAGAGACACCAGCTACGGT |
| NC_045512.2_21mer_win1_15107 | 15107 | 15127 | 2747 | GGCATCGACCACAGAGATAGA | 3729 | AGATAGAGACACCAGCTACGG |
| NC_045512.2_21mer_win1_15108 | 15108 | 15128 | 2748 | GCATCGACCACAGAGATAGAC | 3730 | CAGATAGAGACACCAGCTACG |
| NC_045512.2_2lmer_win1_15109 | 15109 | 15129 | 2749 | CATCGACCACAGAGATAGACA | 3731 | ACAGATAGAGACACCAGCTAC |
| NC_045512.2_2lmer_win1_15110 | 15110 | 15130 | 2750 | ATCGACCACAGAGATAGACAT | 3732 | TACAGATAGAGACACCAGCTA |
| NC_045512.2_2lmer_win1_15111 | 15111 | 15131 | 2751 | TCGACCACAGAGATAGACATC | 3733 | CTACAGATAGAGACACCAGCT |
| NC_045512.2_2lmer_win1_15112 | 15112 | 15132 | 2752 | CGACCACAGAGATAGACATCA | 3734 | ACTACAGATAGAGACACCAGC |
| NC_045512.2_2lmer_win1_15113 | 15113 | 15133 | 2753 | GACCACAGAGATAGACATCAT | 3735 | TACTACAGATAGAGACACCAG |
| NC_045512.2_2lmer_win1_15114 | 15114 | 15134 | 2754 | ACCACAGAGATAGACATCATG | 3736 | GTACTACAGATAGAGACACCA |
| NC_045512.2_2lmer_win1_15115 | 15115 | 15135 | 2755 | CCACAGAGATAGACATCATGA | 3737 | AGTACTACAGATAGAGACACC |
| NC_045512.2_2lmer_win1_15116 | 15116 | 15136 | 2756 | CACAGAGATAGACATCATGAT | 3738 | TAGTACTACAGATAGAGACAC |
| NC_045512.2_2lmer_win1_15117 | 15117 | 15137 | 2757 | ACAGAGATAGACATCATGATA | 3739 | ATAGTACTACAGATAGAGACA |
| NC_045512.2_2lmer_win1_15118 | 15118 | 15138 | 2758 | CAGAGATAGACATCATGATAC | 3740 | CATAGTACTACAGATAGAGAC |
| NC_045512.2_2lmer_win1_15119 | 15119 | 15139 | 2759 | AGAGATAGACATCATGATACT | 3741 | TCATAGTACTACAGATAGAGA |
| NC_045512.2_2lmer_win1_15120 | 15120 | 15140 | 2760 | GAGATAGACATCATGATACTG | 3742 | GTCATAGTACTACAGATAGAG |
| NC_045512.2_2lmer_win1_15172 | 15172 | 15192 | 2761 | AGTTATCGGCGGTGATCTCCT | 3743 | TCCTCTAGTGGCGGCTATTGA |
| NC_045512.2_2lmer_win1_15173 | 15173 | 15193 | 2762 | GTTATCGGCGGTGATCTCCTC | 3744 | CTCCTCTAGTGGCGGCTATTG |
| NC_045512.2_2lmer_win1_15174 | 15174 | 15194 | 2763 | TTATCGGCGGTGATCTCCTCG | 3745 | GCTCCTCTAGTGGCGGCTATT |
| NC_045512.2_2lmer_win1_15175 | 15175 | 15195 | 2764 | TATCGGCGGTGATCTCCTCGA | 3746 | AGCTCCTCTAGTGGCGGCTAT |
| NC_045512.2_2lmer_win1_15176 | 15176 | 15196 | 2765 | ATCGGCGGTGATCTCCTCGAT | 3747 | TAGCTCCTCTAGTGGCGGCTA |
| NC_045512.2_2lmer_win1_15177 | 15177 | 15197 | 2766 | TCGGCGGTGATCTCCTCGATG | 3748 | GTAGCTCCTCTAGTGGCGGCT |
| NC_045512.2_2lmer_win1_15178 | 15178 | 15198 | 2767 | CGGCGGTGATCTCCTCGATGA | 3749 | AGTAGCTCCTCTAGTGGCGGC |
| NC_045512.2_2lmer_win1_15179 | 15179 | 15199 | 2768 | GGCGGTGATCTCCTCGATGAC | 3750 | CAGTAGCTCCTCTAGTGGCGG |
| NC_045512.2_2lmer_win1_15180 | 15180 | 15200 | 2769 | GCGGTGATCTCCTCGATGACA | 3751 | ACAGTAGCTCCTCTAGTGGCG |
| NC_045512.2_2lmer_win1_15310 | 15310 | 15330 | 2770 | TCTCGGTACGGATTGTACGAA | 3752 | AAGCATGTTAGGCATGGCTCT |
| NC_045512.2_2lmer_win1_15311 | 15311 | 15331 | 2771 | CTCGGTACGGATTGTACGAAT | 3753 | TAAGCATGTTAGGCATGGCTC |
| NC_045512.2_21mer_win1_15312 | 15312 | 15332 | 2772 | TCGGTACGGATTGTACGAATC | 3754 | CTAAGCATGTTAGGCATGGCT |
| NC_045512.2_21mer_win1_15346 | 15346 | 15366 | 2773 | GAACAAGAACGAGCGTTTGTA | 3755 | ATGTTTGCGAGCAAGAACAAG |
| NC_045512.2_21mer_win1_15347 | 15347 | 15367 | 2774 | AACAAGAACGAGCGTTTGTAT | 3756 | TATGTTTGCGAGCAAGAACAA |
| NC_045512.2_21mer_win1_15496 | 15496 | 15516 | 2775 | TGTTGACGAATACGATTATCA | 3757 | ACTATTAGCATAAGCAGTTGT |
| NC_045512.2_21mer_win1_15497 | 15497 | 15517 | 2776 | GTTGACGAATACGATTATCAC | 3758 | CACTATTAGCATAAGCAGTTG |
| NC_045512.2_21mer_win1_15498 | 15498 | 15518 | 2777 | TTGACGAATACGATTATCACA | 3759 | ACACTATTAGCATAAGCAGTT |
| NC_045512.2_21mer_win1_15622 | 15622 | 15642 | 2778 | ATACTCACAGAGATATCTTTA | 3760 | ATTTCTATAGAGACACTCATA |
| NC_045512.2_21mer_win1_15623 | 15623 | 15643 | 2779 | TACTCACAGAGATATCTTTAT | 3761 | TATTTCTATAGAGACACTCAT |
| NC_045512.2_21mer_win1_15624 | 15624 | 15644 | 2780 | ACTCACAGAGATATCTTTATC | 3762 | CTATTTCTATAGAGACACTCA |
| NC_045512.2_21mer_win1_15838 | 15838 | 15858 | 2781 | ACCTGACTCTGACTGGAATGA | 3763 | AGTAAGGTCAGTCTCAGTCCA |
| NC_045512.2_21mer_win1_15839 | 15839 | 15859 | 2782 | CCTGACTCTGACTGGAATGAT | 3764 | TAGTAAGGTCAGTCTCAGTCC |
| NC_045512.2_21mer_win1_15840 | 15840 | 15860 | 2783 | CTGACTCTGACTGGAATGATT | 3765 | TTAGTAAGGTCAGTCTCAGTC |
| NC_045512.2_21mer_win1_15841 | 15841 | 15861 | 2784 | TGACTCTGACTGGAATGATTT | 3766 | TTTAGTAAGGTCAGTCTCAGT |
| NC_045512.2_21mer_win1_15842 | 15842 | 15862 | 2785 | GACTCTGACTGGAATGATTTC | 3767 | CTTTAGTAAGGTCAGTCTCAG |
| NC_045512.2_21mer_win1_15843 | 15843 | 15863 | 2786 | ACTCTGACTGGAATGATTTCC | 3768 | CCTTTAGTAAGGTCAGTCTCA |
| NC_045512.2_21mer_win1_15844 | 15844 | 15864 | 2787 | CTCTGACTGGAATGATTTCCT | 3769 | TCCTTTAGTAAGGTCAGTCTC |
| NC_045512.2_21mer_win1_15845 | 15845 | 15865 | 2788 | TCTGACTGGAATGATTTCCTG | 3770 | GTCCTTTAGTAAGGTCAGTCT |
| NC_045512.2_21mer_win1_15846 | 15846 | 15866 | 2789 | CTGACTGGAATGATTTCCTGG | 3771 | GGTCCTTTAGTAAGGTCAGTC |
| NC_045512.2_21mer_win1_15847 | 15847 | 15867 | 2790 | TGACTGGAATGATTTCCTGGA | 3772 | AGGTCCTTTAGTAAGGTCAGT |
| NC_045512.2_21mer_win1_15848 | 15848 | 15868 | 2791 | GACTGGAATGATTTCCTGGAG | 3773 | GAGGTCCTTTAGTAAGGTCAG |
| NC_045512.2_21mer_win1_15849 | 15849 | 15869 | 2792 | ACTGGAATGATTTCCTGGAGT | 3774 | TGAGGTCCTTTAGTAAGGTCA |
| NC_045512.2_21mer_win1_15985 | 15985 | 16005 | 2793 | TTTTGTCTACCATGTGAATAC | 3775 | CATAAGTGTACCATCTGTTTT |
| NC_045512.2_21mer_win1_15986 | 15986 | 16006 | 2794 | TTTGTCTACCATGTGAATACT | 3776 | TCATAAGTGTACCATCTGTTT |
| NC_045512.2_21mer_win1_15987 | 15987 | 16007 | 2795 | TTGTCTACCATGTGAATACTA | 3777 | ATCATAAGTGTACCATCTGTT |
| NC_045512.2_21mer_win1_15988 | 15988 | 16008 | 2796 | TGTCTACCATGTGAATACTAA | 3778 | AATCATAAGTGTACCATCTGT |
| NC_045512.2_21mer_win1_15989 | 15989 | 16009 | 2797 | GTCTACCATGTGAATACTAAC | 3779 | CAATCATAAGTGTACCATCTG |
| NC_045512.2_21mer_win1_15990 | 15990 | 16010 | 2798 | TCTACCATGTGAATACTAACT | 3780 | TCAATCATAAGTGTACCATCT |
| NC_045512.2_21mer_win1_16057 | 16057 | 16077 | 2799 | GGATTAGTCCTCATACGACTA | 3781 | ATCAGCATACTCCTGATTAGG |
| NC_045512.2_21mer_win1_16058 | 16058 | 16078 | 2800 | GATTAGTCCTCATACGACTAC | 3782 | CATCAGCATACTCCTGATTAG |
| NC_045512.2_21mer_win1_16059 | 16059 | 16079 | 2801 | ATTAGTCCTCATACGACTACA | 3783 | ACATCAGCATACTCCTGATTA |
| NC_045512.2_21mer_win1_16822 | 16822 | 16842 | 2802 | CCTCTCATGTGGAAACTTTTT | 3784 | TTTTTCAAAGGTGTACTCTCC |
| NC_045512.2_21mer_win1_16823 | 16823 | 16843 | 2803 | CTCTCATGTGGAAACTTTTTC | 3785 | TTTTTCAAAGGTGTACTCTC |
| NC_045512.2_21mer_win1_16824 | 16824 | 16844 | 2804 | TCTCATGTGGAAACTTTTTCC | 3786 | CCTTTTTCAAAGGTGTACTCT |
| NC_045512.2_21mer_win1_16825 | 16825 | 16845 | 2805 | CTCATGTGGAAACTTTTTCCA | 3787 | ACCTTTTTCAAAGGTGTACTC |
| NC_045512.2_21mer_win1_16826 | 16826 | 16846 | 2806 | TCATGTGGAAACTTTTTCCAC | 3788 | CACCTTTTTCAAAGGTGTACT |
| NC_045512.2_21mer_win1_16827 | 16827 | 16847 | 2807 | CATGTGGAAACTTTTTCCACT | 3789 | TCACCTTTTTCAAAGGTGTAC |
| NC_045512.2_21mer_win1_16828 | 16828 | 16848 | 2808 | ATGTGGAAACTTTTTCCACTG | 3790 | GTCACCTTTTTCAAAGGTGTA |
| NC_045512.2_21mer_win1_16829 | 16829 | 16849 | 2809 | TGTGGAAACTTTTTCCACTGA | 3791 | AGTCACCTTTTTCAAAGGTGT |
| NC_045512.2_21mer_win1_16830 | 16830 | 16850 | 2810 | GTGGAAACTTTTTCCACTGAT | 3792 | TAGTCACCTTTTTCAAAGGTG |
| NC_045512.2_21mer_win1_16831 | 16831 | 16851 | 2811 | TGGAAACTTTTTCCACTGATA | 3793 | ATAGTCACCTTTTTCAAAGGT |
| NC_045512.2_21mer_win1_16832 | 16832 | 16852 | 2812 | GGAAACTTTTTCCACTGATAC | 3794 | CATAGTCACCTTTTTCAAAGG |
| NC_045512.2_21mer_win1_16833 | 16833 | 16853 | 2813 | GAAACTTTTTCCACTGATACC | 3795 | CCATAGTCACCTTTTTCAAAG |
| NC_045512.2_21mer_win1_16834 | 16834 | 16854 | 2814 | AAACTTTTTCCACTGATACCA | 3796 | ACCATAGTCACCTTTTTCAAA |
| NC_045512.2_21mer_win1_16835 | 16835 | 16855 | 2815 | AACTTTTTCCACTGATACCAC | 3797 | CACCATAGTCACCTTTTTCAA |
| NC_045512.2_21mer_win1_16836 | 16836 | 16856 | 2816 | ACTTTTTCCACTGATACCACT | 3798 | TCACCATAGTCACCTTTTTCA |
| NC_045512.2_21mer_win1_16837 | 16837 | 16857 | 2817 | CTTTTTCCACTGATACCACTA | 3799 | ATCACCATAGTCACCTTTTTC |
| NC_045512.2_21mer_win1_16838 | 16838 | 16858 | 2818 | TTTTTCCACTGATACCACTAC | 3800 | CATCACCATAGTCACCTTTTT |
| NC_045512.2_21mer_win1_16839 | 16839 | 16859 | 2819 | TTTTCCACTGATACCACTACG | 3801 | GCATCACCATAGTCACCTTTT |
| NC_045512.2_21mer_win1_16840 | 16840 | 16860 | 2820 | TTTCCACTGATACCACTACGA | 3802 | AGCATCACCATAGTCACCTTT |
| NC_045512.2_21mer_win1_16841 | 16841 | 16861 | 2821 | TTCCACTGATACCACTACGAC | 3803 | CAGCATCACCATAGTCACCTT |
| NC_045512.2_21mer_win1_16842 | 16842 | 16862 | 2822 | TCCACTGATACCACTACGACA | 3804 | ACAGCATCACCATAGTCACCT |
| NC_045512.2_21mer_win1_16843 | 16843 | 16863 | 2823 | CCACTGATACCACTACGACAA | 3805 | AACAGCATCACCATAGTCACC |
| NC_045512.2_21mer_win1_16844 | 16844 | 16864 | 2824 | CACTGATACCACTACGACAAC | 3806 | CAACAGCATCACCATAGTCAC |
| NC_045512.2_21mer_win1_16845 | 16845 | 16865 | 2825 | ACTGATACCACTACGACAACA | 3807 | ACAACAGCATCACCATAGTCA |
| NC_045512.2_21mer_win1_16954 | 16954 | 16974 | 2826 | GATCACGGTGTTCTCGTGATA | 3808 | ATAGTGCTCTTGTGGCACTAG |
| NC_045512.2_21mer_win1_16955 | 16955 | 16975 | 2827 | ATCACGGTGTTCTCGTGATAC | 3809 | CATAGTGCTCTTGTGGCACTA |
| NC_045512.2_21mer_win1_16956 | 16956 | 16976 | 2828 | TCACGGTGTTCTCGTGATACA | 3810 | ACATAGTGCTCTTGTGGCACT |
| NC_045512.2_21mer_win1_17008 | 17008 | 17028 | 2829 | TAGAGTCTACTCAAAAGATCG | 3811 | GCTAGAAAACTCATCTGAGAT |
| NC_045512.2_21mer_win1_17009 | 17009 | 17029 | 2830 | AGAGTCTACTCAAAAGATCGT | 3812 | TGCTAGAAAACTCATCTGAGA |
| NC_045512.2_21mer_win1_17010 | 17010 | 17030 | 2831 | GAGTCTACTCAAAAGATCGTT | 3813 | TTGCTAGAAAACTCATCTGAG |
| NC_045512.2_21mer_win1_17011 | 17011 | 17031 | 2832 | AGTCTACTCAAAAGATCGTTA | 3814 | ATTGCTAGAAAACTCATCTGA |
| NC_045512.2_21mer_win1_17012 | 17012 | 17032 | 2833 | GTCTACTCAAAAGATCGTTAC | 3815 | CATTGCTAGAAAACTCATCTG |
| NC_045512.2_21mer_win1_17013 | 17013 | 17033 | 2834 | TCTACTCAAAAGATCGTTACA | 3816 | ACATTGCTAGAAAACTCATCT |
| NC_045512.2_21mer_win1_17014 | 17014 | 17034 | 2835 | CTACTCAAAAGATCGTTACAA | 3817 | AACATTGCTAGAAAACTCATC |
| NC_045512.2_21mer_win1_17015 | 17015 | 17035 | 2836 | TACTCAAAAGATCGTTACAAC | 3818 | CAACATTGCTAGAAAACTCAT |
| NC_045512.2_21mer_win1_17016 | 17016 | 17036 | 2837 | ACTCAAAAGATCGTTACAACG | 3819 | GCAACATTGCTAGAAAACTCA |
| NC_045512.2_21mer_win1_17017 | 17017 | 17037 | 2838 | CTCAAAAGATCGTTACAACGT | 3820 | TGCAACATTGCTAGAAAACTC |
| NC_045512.2_21mer_win1_17018 | 17018 | 17038 | 2839 | TCAAAAGATCGTTACAACGTT | 3821 | TTGCAACATTGCTAGAAAACT |
| NC_045512.2_21mer_win1_17019 | 17019 | 17039 | 2840 | CAAAAGATCGTTACAACGTTT | 3822 | TTTGCAACATTGCTAGAAAAC |
| NC_045512.2_21mer_win1_17020 | 17020 | 17040 | 2841 | AAAAGATCGTTACAACGTTTA | 3823 | ATTTGCAACATTGCTAGAAAA |
| NC_045512.2_21mer_win1_17021 | 17021 | 17041 | 2842 | AAAGATCGTTACAACGTTTAA | 3824 | AATTTGCAACATTGCTAGAAA |
| NC_045512.2_21mer_win1_17022 | 17022 | 17042 | 2843 | AAGATCGTTACAACGTTTAAT | 3825 | TAATTTGCAACATTGCTAGAA |
| NC_045512.2_21mer_win1_17080 | 17080 | 17100 | 2844 | CCTGGTGGACCATGACCATTC | 3826 | CTTACCAGTACCAGGTGGTCC |
| NC_045512.2_21mer_win1_17081 | 17081 | 17101 | 2845 | CTGGTGGACCATGACCATTCT | 3827 | TCTTACCAGTACCAGGTGGTC |
| NC_045512.2_21mer_win1_17082 | 17082 | 17102 | 2846 | TGGTGGACCATGACCATTCTC | 3828 | CTCTTACCAGTACCAGGTGGT |
| NC_045512.2_21mer_win1_17083 | 17083 | 17103 | 2847 | GGTGGACCATGACCATTCTCA | 3829 | ACTCTTACCAGTACCAGGTGG |
| NC_045512.2_21mer_win1_17084 | 17084 | 17104 | 2848 | GTGGACCATGACCATTCTCAG | 3830 | GACTCTTACCAGTACCAGGTG |
| NC_045512.2_21mer_win1_17085 | 17085 | 17105 | 2849 | TGGACCATGACCATTCTCAGT | 3831 | TGACTCTTACCAGTACCAGGT |
| NC_045512.2_21mer_win1_17086 | 17086 | 17106 | 2850 | GGACCATGACCATTCTCAGTA | 3832 | ATGACTCTTACCAGTACCAGG |
| NC_045512.2_21mer_win1_17087 | 17087 | 17107 | 2851 | GACCATGACCATTCTCAGTAA | 3833 | AATGACTCTTACCAGTACCAG |
| NC_045512.2_21mer_win1_17088 | 17088 | 17108 | 2852 | ACCATGACCATTCTCAGTAAA | 3834 | AAATGACTCTTACCAGTACCA |
| NC_045512.2_21mer_win1_17089 | 17089 | 17109 | 2853 | CCATGACCATTCTCAGTAAAA | 3835 | AAAATGACTCTTACCAGTACC |
| NC_045512.2_21mer_win1_17090 | 17090 | 17110 | 2854 | CATGACCATTCTCAGTAAAAC | 3836 | CAAAATGACTCTTACCAGTAC |
| NC_045512.2_21mer_win1_17091 | 17091 | 17111 | 2855 | ATGACCATTCTCAGTAAAACG | 3837 | GCAAAATGACTCTTACCAGTA |
| NC_045512.2_21mer_win1_17269 | 17269 | 17289 | 2856 | TTTAAGTTTCACTTAAGTTGT | 3838 | TGTTGAATTCACTTTGAATTT |
| NC_045512.2_21mer_win1_18100 | 18100 | 18120 | 2857 | TGTGTCCGTGGATGTGTGGAG | 3839 | GAGGTGTGTAGGTGCCTGTGT |
| NC_045512.2_21mer_win1_18101 | 18101 | 18121 | 2858 | GTGTCCGTGGATGTGTGGAGT | 3840 | TGAGGTGTGTAGGTGCCTGTG |
| NC_045512.2_21mer_win1_18102 | 18102 | 18122 | 2859 | TGTCCGTGGATGTGTGGAGTC | 3841 | CTGAGGTGTGTAGGTGCCTGT |
| NC_045512.2_21mer_win1_18196 | 18196 | 18216 | 2860 | TCTGAGTAGAGATACTACCCA | 3842 | ACCCATCATAGAGATGAGTCT |
| NC_045512.2_21mer_win1_18197 | 18197 | 18217 | 2861 | CTGAGTAGAGATACTACCCAA | 3843 | AACCCATCATAGAGATGAGTC |
| NC_045512.2_21mer_win1_18198 | 18198 | 18218 | 2862 | TGAGTAGAGATACTACCCAAA | 3844 | AAACCCATCATAGAGATGAGT |
| NC_045512.2_21mer_win1_19618 | 19618 | 19638 | 2863 | GTCTCAAATCTTTTACACCGA | 3845 | AGCCACATTTTCTAAACTCTG |
| NC_045512.2_21mer_win1_19619 | 19619 | 19639 | 2864 | TCTCAAATCTTTTACACCGAA | 3846 | AAGCCACATTTTCTAAACTCT |
| NC_045512.2_21mer_win1_20107 | 20107 | 20127 | 2865 | TTACCTCAGTGTAATTAACCT | 3847 | TCCAATTAATGTGACTCCATT |
| NC_045512.2_21mer_win1_20108 | 20108 | 20128 | 2866 | TACCTCAGTGTAATTAACCTC | 3848 | CTCCAATTAATGTGACTCCAT |
| NC_045512.2_21mer_win1_20109 | 20109 | 20129 | 2867 | ACCTCAGTGTAATTAACCTCT | 3849 | TCTCCAATTAATGTGACTCCA |
| NC_045512.2_21mer_win1_20110 | 20110 | 20130 | 2868 | CCTCAGTGTAATTAACCTCTT | 3850 | TTCTCCAATTAATGTGACTCC |
| NC_045512.2_21mer_win1_21502 | 21502 | 21522 | 2869 | TAATCTCTTTTGTTGTCTCAA | 3851 | AACTCTGTTGTTTTCTCTAAT |
| NC_045512.2_21mer_win1_21503 | 21503 | 21523 | 2870 | AATCTCTTTTGTTGTCTCAAC | 3852 | CAACTCTGTTGTTTTCTCTAA |
| NC_045512.2_21mer_win1_21504 | 21504 | 21524 | 2871 | ATCTCTTTTGTTGTCTCAACA | 3853 | ACAACTCTGTTGTTTTCTCTA |
| NC_045512.2_21mer_win1_24302 | 24302 | 24322 | 2872 | TTACAAGAGATACTCTTGGTT | 3854 | TTGGTTCTCATAGAGAACATT |
| NC_045512.2_21mer_win1_24303 | 24303 | 24323 | 2873 | TACAAGAGATACTCTTGGTTT | 3855 | TTTGGTTCTCATAGAGAACAT |
| NC_045512.2_21mer_win1_24304 | 24304 | 24324 | 2874 | ACAAGAGATACTCTTGGTTTT | 3856 | TTTTGGTTCTCATAGAGAACA |
| NC_045512.2_21mer_win1_24305 | 24305 | 24325 | 2875 | CAAGAGATACTCTTGGTTTTT | 3857 | TTTTTGGTTCTCATAGAGAAC |
| NC_045512.2_21mer_win1_24620 | 24620 | 24640 | 2876 | CGAAGACGATTAGAACGACGA | 3858 | AGCAGCAAGATTAGCAGAAGC |
| NC_045512.2_21mer_win1_24621 | 24621 | 24641 | 2877 | GAAGACGATTAGAACGACGAT | 3859 | TAGCAGCAAGATTAGCAGAAG |
| NC_045512.2_21mer_win1_24622 | 24622 | 24642 | 2878 | AAGACGATTAGAACGACGATG | 3860 | GTAGCAGCAAGATTAGCAGAA |
| NC_045512.2_21mer_win1_24623 | 24623 | 24643 | 2879 | AGACGATTAGAACGACGATGA | 3861 | AGTAGCAGCAAGATTAGCAGA |
| NC_045512.2_21mer_win1_24624 | 24624 | 24644 | 2880 | GACGATTAGAACGACGATGAT | 3862 | TAGTAGCAGCAAGATTAGCAG |
| NC_045512.2_21mer_win1_24625 | 24625 | 24645 | 2881 | ACGATTAGAACGACGATGATT | 3863 | TTAGTAGCAGCAAGATTAGCA |
| NC_045512.2_21mer_win1_24626 | 24626 | 24646 | 2882 | CGATTAGAACGACGATGATTT | 3864 | TTTAGTAGCAGCAAGATTAGC |
| NC_045512.2_21mer_win1_24627 | 24627 | 24647 | 2883 | GATTAGAACGACGATGATTTT | 3865 | TTTTAGTAGCAGCAAGATTAG |
| NC_045512.2_21mer_win1_24628 | 24628 | 24648 | 2884 | ATTAGAACGACGATGATTTTA | 3866 | ATTTTAGTAGCAGCAAGATTA |
| NC_045512.2_21mer_win1_24629 | 24629 | 24649 | 2885 | TTAGAACGACGATGATTTTAC | 3867 | CATTTTAGTAGCAGCAAGATT |
| NC_045512.2_21mer_win1_24630 | 24630 | 24650 | 2886 | TAGAACGACGATGATTTTACA | 3868 | ACATTTTAGTAGCAGCAAGAT |
| NC_045512.2_21mer_win1_24631 | 24631 | 24651 | 2887 | AGAACGACGATGATTTTACAG | 3869 | GACATTTTAGTAGCAGCAAGA |
| NC_045512.2_21mer_win1_24662 | 24662 | 24682 | 2888 | GAACCTGTTAGTTTTTCTCAA | 3870 | AACTCTTTTTGATTGTCCAAG |
| NC_045512.2_21mer_win1_24663 | 24663 | 24683 | 2889 | AACCTGTTAGTTTTTCTCAAC | 3871 | CAACTCTTTTTGATTGTCCAA |
| NC_045512.2_21mer_win1_24664 | 24664 | 24684 | 2890 | ACCTGTTAGTTTTTCTCAACT | 3872 | TCAACTCTTTTTGATTGTCCA |
| NC_045512.2_21mer_win1_25034 | 25034 | 25054 | 2891 | TTAGTATGTAGTGGTCTACAA | 3873 | AACATCTGGTGATGTATGATT |
| NC_045512.2_2lmer_win1_25035 | 25035 | 25055 | 2892 | TAGTATGTAGTGGTCTACAAC | 3874 | CAACATCTGGTGATGTATGAT |
| NC_045512.2_21mer_win1_25036 | 25036 | 25056 | 2893 | AGTATGTAGTGGTCTACAACT | 3875 | TCAACATCTGGTGATGTATGA |
| NC_045512.2_21mer_win1_25037 | 25037 | 25057 | 2894 | GTATGTAGTGGTCTACAACTA | 3876 | ATCAACATCTGGTGATGTATG |
| NC_045512.2_2lmer_win1_25104 | 25104 | 25124 | 2895 | TTCTTTAACTGGCGGAGTTAC | 3877 | CATTGAGGCGGTCAATTTCTT |
| NC_045512.2_2lmer_win1_25105 | 25105 | 25125 | 2896 | TCTTTAACTGGCGGAGTTACT | 3878 | TCATTGAGGCGGTCAATTTCT |
| NC_045512.2_2lmer_win1_25106 | 25106 | 25126 | 2897 | CTTTAACTGGCGGAGTTACTC | 3879 | CTCATTGAGGCGGTCAATTTC |
| NC_045512.2_2lmer_win1_25107 | 25107 | 25127 | 2898 | TTTAACTGGCGGAGTTACTCC | 3880 | CCTCATTGAGGCGGTCAATTT |
| NC_045512.2_2lmer_win1_25108 | 25108 | 25128 | 2899 | TTAACTGGCGGAGTTACTCCA | 3881 | ACCTCATTGAGGCGGTCAATT |
| NC_045512.2_21mer_win1_25364 | 25364 | 25384 | 2900 | CAGTTTAATGTAATGTGTATT | 3882 | TTATGTGTAATGTAATTTGAC |
| NC_045512.2_21mer_win1_25365 | 25365 | 25385 | 2901 | AGTTTAATGTAATGTGTATTT | 3883 | TTTATGTGTAATGTAATTTGA |
| NC_045512.2_21mer_win1_25366 | 25366 | 25386 | 2902 | GTTTAATGTAATGTGTATTTG | 3884 | GTTTATGTGTAATGTAATTTG |
| NC_045512.2_21mer_win1_25367 | 25367 | 25387 | 2903 | TTTAATGTAATGTGTATTTGC | 3885 | CGTTTATGTGTAATGTAATTT |
| NC_045512.2_21mer_win1_25502 | 25502 | 25522 | 2904 | ATGTTCGGAGTGAGGGAAAGC | 3886 | CGAAAGGGAGTGAGGCTTGTA |
| NC_045512.2_21mer_win1_25503 | 25503 | 25523 | 2905 | TGTTCGGAGTGAGGGAAAGCC | 3887 | CCGAAAGGGAGTGAGGCTTGT |
| NC_045512.2_21mer_win1_25504 | 25504 | 25524 | 2906 | GTTCGGAGTGAGGGAAAGCCT | 3888 | TCCGAAAGGGAGTGAGGCTTG |
| NC_045512.2_21mer_win1_25505 | 25505 | 25525 | 2907 | TTCGGAGTGAGGGAAAGCCTA | 3889 | ATCCGAAAGGGAGTGAGGCTT |
| NC_045512.2_21mer_win1_25506 | 25506 | 25526 | 2908 | TCGGAGTGAGGGAAAGCCTAC | 3890 | CATCCGAAAGGGAGTGAGGCT |
| NC_045512.2_21mer_win1_25507 | 25507 | 25527 | 2909 | CGGAGTGAGGGAAAGCCTACC | 3891 | CCATCCGAAAGGGAGTGAGGC |
| NC_045512.2_21mer_win1_25508 | 25508 | 25528 | 2910 | GGAGTGAGGGAAAGCCTACCG | 3892 | GCCATCCGAAAGGGAGTGAGG |
| NC_045512.2_21mer_win1_25509 | 25509 | 25529 | 2911 | GAGTGAGGGAAAGCCTACCGA | 3893 | AGCCATCCGAAAGGGAGTGAG |
| NC_045512.2_21mer_win1_25510 | 25510 | 25530 | 2912 | AGTGAGGGAAAGCCTACCGAA | 3894 | AAGCCATCCGAAAGGGAGTGA |
| NC_045512.2_21mer_win1_26191 | 26191 | 26211 | 2913 | GGCTGCTGCTGATGATCGCAC | 3895 | CACGCTAGTAGTCGTCGTCGG |
| NC_045512.2_21mer_win1_26192 | 26192 | 26212 | 2914 | GCTGCTGCTGATGATCGCACG | 3896 | GCACGCTAGTAGTCGTCGTCG |
| NC_045512.2_21mer_win1_26193 | 26193 | 26213 | 2915 | CTGCTGCTGATGATCGCACGG | 3897 | GGCACGCTAGTAGTCGTCGTC |
| NC_045512.2_21mer_win1_26194 | 26194 | 26214 | 2916 | TGCTGCTGATGATCGCACGGA | 3898 | AGGCACGCTAGTAGTCGTCGT |
| NC_045512.2_21mer_win1_26195 | 26195 | 26215 | 2917 | GCTGCTGATGATCGCACGGAA | 3899 | AAGGCACGCTAGTAGTCGTCG |
| NC_045512.2_21mer_win1_26196 | 26196 | 26216 | 2918 | CTGCTGATGATCGCACGGAAA | 3900 | AAAGGCACGCTAGTAGTCGTC |
| NC_045512.2_21mer_win1_26197 | 26197 | 26217 | 2919 | TGCTGATGATCGCACGGAAAC | 3901 | CAAAGGCACGCTAGTAGTCGT |
| NC_045512.2_21mer_win1_26198 | 26198 | 26218 | 2920 | GCTGATGATCGCACGGAAACA | 3902 | ACAAAGGCACGCTAGTAGTCG |
| NC_045512.2_21mer_win1_26199 | 26199 | 26219 | 2921 | CTGATGATCGCACGGAAACAT | 3903 | TACAAAGGCACGCTAGTAGTC |
| NC_045512.2_21mer_win1_26200 | 26200 | 26220 | 2922 | TGATGATCGCACGGAAACATT | 3904 | TTACAAAGGCACGCTAGTAGT |
| NC_045512.2_21mer_win1_26201 | 26201 | 26221 | 2923 | GATGATCGCACGGAAACATTC | 3905 | CTTACAAAGGCACGCTAGTAG |
| NC_045512.2_21mer_win1_26202 | 26202 | 26222 | 2924 | ATGATCGCACGGAAACATTCG | 3906 | GCTTACAAAGGCACGCTAGTA |
| NC_045512.2_21mer_win1_26203 | 26203 | 26223 | 2925 | TGATCGCACGGAAACATTCGT | 3907 | TGCTTACAAAGGCACGCTAGT |
| NC_045512.2_21mer_win1_26204 | 26204 | 26224 | 2926 | GATCGCACGGAAACATTCGTG | 3908 | GTGCTTACAAAGGCACGCTAG |
| NC_045512.2_21mer_win1_26205 | 26205 | 26225 | 2927 | ATCGCACGGAAACATTCGTGT | 3909 | TGTGCTTACAAAGGCACGCTA |
| NC_045512.2_21mer_win1_26206 | 26206 | 26226 | 2928 | TCGCACGGAAACATTCGTGTT | 3910 | TTGTGCTTACAAAGGCACGCT |
| NC_045512.2_21mer_win1_26207 | 26207 | 26227 | 2929 | CGCACGGAAACATTCGTGTTC | 3911 | CTTGTGCTTACAAAGGCACGC |
| NC_045512.2_21mer_win1_26232 | 26232 | 26252 | 2930 | ACTCATGCTTGAATACATGAG | 3912 | GAGTACATAAGTTCGTACTCA |
| NC_045512.2_21mer_win1_26233 | 26233 | 26253 | 2931 | CTCATGCTTGAATACATGAGT | 3913 | TGAGTACATAAGTTCGTACTC |
| NC_045512.2_21mer_win1_26234 | 26234 | 26254 | 2932 | TCATGCTTGAATACATGAGTA | 3914 | ATGAGTACATAAGTTCGTACT |
| NC_045512.2_21mer_win1_26235 | 26235 | 26255 | 2933 | CATGCTTGAATACATGAGTAA | 3915 | AATGAGTACATAAGTTCGTAC |
| NC_045512.2_21mer_win1_26236 | 26236 | 26256 | 2934 | ATGCTTGAATACATGAGTAAG | 3916 | GAATGAGTACATAAGTTCGTA |
| NC_045512.2_21mer_win1_26237 | 26237 | 26257 | 2935 | TGCTTGAATACATGAGTAAGC | 3917 | CGAATGAGTACATAAGTTCGT |
| NC_045512.2_21mer_win1_26238 | 26238 | 26258 | 2936 | GCTTGAATACATGAGTAAGCA | 3918 | ACGAATGAGTACATAAGTTCG |
| NC_045512.2_21mer_win1_26239 | 26239 | 26259 | 2937 | CTTGAATACATGAGTAAGCAA | 3919 | AACGAATGAGTACATAAGTTC |
| NC_045512.2_21mer_win1_26240 | 26240 | 26260 | 2938 | TTGAATACATGAGTAAGCAAA | 3920 | AAACGAATGAGTACATAAGTT |
| NC_045512.2_21mer_win1_26241 | 26241 | 26261 | 2939 | TGAATACATGAGTAAGCAAAG | 3921 | GAAACGAATGAGTACATAAGT |
| NC_045512.2_21mer_win1_26242 | 26242 | 26262 | 2940 | GAATACATGAGTAAGCAAAGC | 3922 | CGAAACGAATGAGTACATAAG |
| NC_045512.2_21mer_win1_26243 | 26243 | 26263 | 2941 | AATACATGAGTAAGCAAAGCC | 3923 | CCGAAACGAATGAGTACATAA |
| NC_045512.2_21mer_win1_26244 | 26244 | 26264 | 2942 | ATACATGAGTAAGCAAAGCCT | 3924 | TCCGAAACGAATGAGTACATA |
| NC_045512.2_21mer_win1_26245 | 26245 | 26265 | 2943 | TACATGAGTAAGCAAAGCCTT | 3925 | TTCCGAAACGAATGAGTACAT |
| NC_045512.2_21mer_win1_26246 | 26246 | 26266 | 2944 | ACATGAGTAAGCAAAGCCTTC | 3926 | CTTCCGAAACGAATGAGTACA |
| NC_045512.2_21mer_win1_26247 | 26247 | 26267 | 2945 | CATGAGTAAGCAAAGCCTTCT | 3927 | TCTTCCGAAACGAATGAGTAC |
| NC_045512.2_21mer_win1_26269 | 26269 | 26289 | 2946 | TGTCCATGCAATTATCAATTA | 3928 | ATTAACTATTAACGTACCTGT |
| NC_045512.2_21mer_win1_26270 | 26270 | 26290 | 2947 | GTCCATGCAATTATCAATTAT | 3929 | TATTAACTATTAACGTACCTG |
| NC_045512.2_21mer_win1_26271 | 26271 | 26291 | 2948 | TCCATGCAATTATCAATTATC | 3930 | CTATTAACTATTAACGTACCT |
| NC_045512.2_21mer_win1_26272 | 26272 | 26292 | 2949 | CCATGCAATTATCAATTATCG | 3931 | GCTATTAACTATTAACGTACC |
| NC_045512.2_21mer_win1_26273 | 26273 | 26293 | 2950 | CATGCAATTATCAATTATCGC | 3932 | CGCTATTAACTATTAACGTAC |
| NC_045512.2_21mer_win1_26274 | 26274 | 26294 | 2951 | ATGCAATTATCAATTATCGCA | 3933 | ACGCTATTAACTATTAACGTA |
| NC_045512.2_21mer_win1_26275 | 26275 | 26295 | 2952 | TGCAATTATCAATTATCGCAT | 3934 | TACGCTATTAACTATTAACGT |
| NC_045512.2_21mer_win1_26276 | 26276 | 26296 | 2953 | GCAATTATCAATTATCGCATG | 3935 | GTACGCTATTAACTATTAACG |
| NC_045512.2_21mer_win1_26277 | 26277 | 26297 | 2954 | CAATTATCAATTATCGCATGA | 3936 | AGTACGCTATTAACTATTAAC |
| NC_045512.2_21mer_win1_26278 | 26278 | 26298 | 2955 | AATTATCAATTATCGCATGAA | 3937 | AAGTACGCTATTAACTATTAA |
| NC_045512.2_21mer_win1_26279 | 26279 | 26299 | 2956 | ATTATCAATTATCGCATGAAG | 3938 | GAAGTACGCTATTAACTATTA |
| NC_045512.2_21mer_win1_26280 | 26280 | 26300 | 2957 | TTATCAATTATCGCATGAAGA | 3939 | AGAAGTACGCTATTAACTATT |
| NC_045512.2_21mer_win1_26281 | 26281 | 26301 | 2958 | TATCAATTATCGCATGAAGAA | 3940 | AAGAAGTACGCTATTAACTAT |
| NC_045512.2_21mer_win1_26282 | 26282 | 26302 | 2959 | ATCAATTATCGCATGAAGAAA | 3941 | AAAGAAGTACGCTATTAACTA |
| NC_045512.2_21mer_win1_26283 | 26283 | 26303 | 2960 | TCAATTATCGCATGAAGAAAA | 3942 | AAAAGAAGTACGCTATTAACT |
| NC_045512.2_21mer_win1_26284 | 26284 | 26304 | 2961 | CAATTATCGCATGAAGAAAAA | 3943 | AAAAAGAAGTACGCTATTAAC |
| NC_045512.2_21mer_win1_26285 | 26285 | 26305 | 2962 | AATTATCGCATGAAGAAAAAG | 3944 | GAAAAAGAAGTACGCTATTAA |
| NC_045512.2_21mer_win1_26286 | 26286 | 26306 | 2963 | ATTATCGCATGAAGAAAAAGA | 3945 | AGAAAAAGAAGTACGCTATTA |
| NC_045512.2_21mer_win1_26287 | 26287 | 26307 | 2964 | TTATCGCATGAAGAAAAAGAA | 3946 | AAGAAAAAGAAGTACGCTATT |
| NC_045512.2_21mer_win1_26288 | 26288 | 26308 | 2965 | TATCGCATGAAGAAAAAGAAC | 3947 | CAAGAAAAAGAAGTACGCTAT |
| NC_045512.2_21mer_win1_26289 | 26289 | 26309 | 2966 | ATCGCATGAAGAAAAAGAACG | 3948 | GCAAGAAAAAGAAGTACGCTA |
| NC_045512.2_21mer_win1_26290 | 26290 | 26310 | 2967 | TCGCATGAAGAAAAAGAACGA | 3949 | AGCAAGAAAAAGAAGTACGCT |
| NC_045512.2_21mer_win1_26291 | 26291 | 26311 | 2968 | CGCATGAAGAAAAAGAACGAA | 3950 | AAGCAAGAAAAAGAAGTACGC |
| NC_045512.2_21mer_win1_26292 | 26292 | 26312 | 2969 | GCATGAAGAAAAAGAACGAAA | 3951 | AAAGCAAGAAAAAGAAGTACG |
| NC_045512.2_21mer_win1_26293 | 26293 | 26313 | 2970 | CATGAAGAAAAAGAACGAAAG | 3952 | GAAAGCAAGAAAAAGAAGTAC |
| NC_045512.2_21mer_win1_26294 | 26294 | 26314 | 2971 | ATGAAGAAAAAGAACGAAAGC | 3953 | CGAAAGCAAGAAAAAGAAGTA |
| NC_045512.2_21mer_win1_26295 | 26295 | 26315 | 2972 | TGAAGAAAAAGAACGAAAGCA | 3954 | ACGAAAGCAAGAAAAAGAAGT |
| NC_045512.2_21mer_win1_26296 | 26296 | 26316 | 2973 | GAAGAAAAAGAACGAAAGCAC | 3955 | CACGAAAGCAAGAAAAAGAAG |
| NC_045512.2_21mer_win1_26297 | 26297 | 26317 | 2974 | AAGAAAAAGAACGAAAGCACC | 3956 | CCACGAAAGCAAGAAAAAGAA |
| NC_045512.2_21mer_win1_26298 | 26298 | 26318 | 2975 | AGAAAAAGAACGAAAGCACCA | 3957 | ACCACGAAAGCAAGAAAAAGA |
| NC_045512.2_21mer_win1_26299 | 26299 | 26319 | 2976 | GAAAAAGAACGAAAGCACCAT | 3958 | TACCACGAAAGCAAGAAAAAG |
| NC_045512.2_21mer_win1_26300 | 26300 | 26320 | 2977 | AAAAAGAACGAAAGCACCATA | 3959 | ATACCACGAAAGCAAGAAAAA |
| NC_045512.2_21mer_win1_26301 | 26301 | 26321 | 2978 | AAAAGAACGAAAGCACCATAA | 3960 | AATACCACGAAAGCAAGAAAA |
| NC_045512.2_21mer_win1_26302 | 26302 | 26322 | 2979 | AAAGAACGAAAGCACCATAAG | 3961 | GAATACCACGAAAGCAAGAAA |
| NC_045512.2_21mer_win1_26303 | 26303 | 26323 | 2980 | AAGAACGAAAGCACCATAAGA | 3962 | AGAATACCACGAAAGCAAGAA |
| NC_045512.2_21mer_win1_26304 | 26304 | 26324 | 2981 | AGAACGAAAGCACCATAAGAA | 3963 | AAGAATACCACGAAAGCAAGA |
| NC_045512.2_21mer_win1_26305 | 26305 | 26325 | 2982 | GAACGAAAGCACCATAAGAAC | 3964 | CAAGAATACCACGAAAGCAAG |
| NC_045512.2_21mer_win1_26306 | 26306 | 26326 | 2983 | AACGAAAGCACCATAAGAACG | 3965 | GCAAGAATACCACGAAAGCAA |
| NC_045512.2_21mer_win1_26307 | 26307 | 26327 | 2984 | ACGAAAGCACCATAAGAACGA | 3966 | AGCAAGAATACCACGAAAGCA |
| NC_045512.2_21mer_win1_26308 | 26308 | 26328 | 2985 | CGAAAGCACCATAAGAACGAT | 3967 | TAGCAAGAATACCACGAAAGC |
| NC_045512.2_21mer_win1_26309 | 26309 | 26329 | 2986 | GAAAGCACCATAAGAACGATC | 3968 | CTAGCAAGAATACCACGAAAG |
| NC_045512.2_21mer_win1_26310 | 26310 | 26330 | 2987 | AAAGCACCATAAGAACGATCA | 3969 | ACTAGCAAGAATACCACGAAA |
| NC_045512.2_21mer_win1_26332 | 26332 | 26352 | 2988 | TGTGATCGGTAGGAATGACGC | 3970 | CGCAGTAAGGATGGCTAGTGT |
| NC_045512.2_21mer_win1_26333 | 26333 | 26353 | 2989 | GTGATCGGTAGGAATGACGCG | 3971 | GCGCAGTAAGGATGGCTAGTG |
| NC_045512.2_21mer_win1_26334 | 26334 | 26354 | 2990 | TGATCGGTAGGAATGACGCGA | 3972 | AGCGCAGTAAGGATGGCTAGT |
| NC_045512.2_21mer_win1_26335 | 26335 | 26355 | 2991 | GATCGGTAGGAATGACGCGAA | 3973 | AAGCGCAGTAAGGATGGCTAG |
| NC_045512.2_21mer_win1_26336 | 26336 | 26356 | 2992 | ATCGGTAGGAATGACGCGAAG | 3974 | GAAGCGCAGTAAGGATGGCTA |
| NC_045512.2_21mer_win1_26337 | 26337 | 26357 | 2993 | TCGGTAGGAATGACGCGAAGC | 3975 | CGAAGCGCAGTAAGGATGGCT |
| NC_045512.2_21mer_win1_26338 | 26338 | 26358 | 2994 | CGGTAGGAATGACGCGAAGCT | 3976 | TCGAAGCGCAGTAAGGATGGC |
| NC_045512.2_21mer_win1_26339 | 26339 | 26359 | 2995 | GGTAGGAATGACGCGAAGCTA | 3977 | ATCGAAGCGCAGTAAGGATGG |
| NC_045512.2_21mer_win1_26340 | 26340 | 26360 | 2996 | GTAGGAATGACGCGAAGCTAA | 3978 | AATCGAAGCGCAGTAAGGATG |
| NC_045512.2_21mer_win1_26341 | 26341 | 26361 | 2997 | TAGGAATGACGCGAAGCTAAC | 3979 | CAATCGAAGCGCAGTAAGGAT |
| NC_045512.2_21mer_win1_26342 | 26342 | 26362 | 2998 | AGGAATGACGCGAAGCTAACA | 3980 | ACAATCGAAGCGCAGTAAGGA |
| NC_045512.2_21mer_win1_26343 | 26343 | 26363 | 2999 | GGAATGACGCGAAGCTAACAC | 3981 | CACAATCGAAGCGCAGTAAGG |
| NC_045512.2_21mer_win1_26344 | 26344 | 26364 | 3000 | GAATGACGCGAAGCTAACACA | 3982 | ACACAATCGAAGCGCAGTAAG |
| NC_045512.2_21mer_win1_26345 | 26345 | 26365 | 3001 | AATGACGCGAAGCTAACACAC | 3983 | CACACAATCGAAGCGCAGTAA |
| NC_045512.2_21mer_win1_26346 | 26346 | 26366 | 3002 | ATGACGCGAAGCTAACACACG | 3984 | GCACACAATCGAAGCGCAGTA |
| NC_045512.2_21mer_win1_26347 | 26347 | 26367 | 3003 | TGACGCGAAGCTAACACACGC | 3985 | CGCACACAATCGAAGCGCAGT |
| NC_045512.2_21mer_win1_26348 | 26348 | 26368 | 3004 | GACGCGAAGCTAACACACGCA | 3986 | ACGCACACAATCGAAGCGCAG |
| NC_045512.2_21mer_win1_26349 | 26349 | 26369 | 3005 | ACGCGAAGCTAACACACGCAT | 3987 | TACGCACACAATCGAAGCGCA |
| NC_045512.2_21mer_win1_26350 | 26350 | 26370 | 3006 | CGCGAAGCTAACACACGCATG | 3988 | GTACGCACACAATCGAAGCGC |
| NC_045512.2_21mer_win1_26351 | 26351 | 26371 | 3007 | GCGAAGCTAACACACGCATGA | 3989 | AGTACGCACACAATCGAAGCG |
| NC_045512.2_21mer_win1_26352 | 26352 | 26372 | 3008 | CGAAGCTAACACACGCATGAC | 3990 | CAGTACGCACACAATCGAAGC |
| NC_045512.2_21mer_win1_26353 | 26353 | 26373 | 3009 | GAAGCTAACACACGCATGACG | 3991 | GCAGTACGCACACAATCGAAG |
| NC_045512.2_21mer_win1_26354 | 26354 | 26374 | 3010 | AAGCTAACACACGCATGACGA | 3992 | AGCAGTACGCACACAATCGAA |
| NC_045512.2_21mer_win1_26355 | 26355 | 26375 | 3011 | AGCTAACACACGCATGACGAC | 3993 | CAGCAGTACGCACACAATCGA |
| NC_045512.2_21mer_win1_26356 | 26356 | 26376 | 3012 | GCTAACACACGCATGACGACG | 3994 | GCAGCAGTACGCACACAATCG |
| NC_045512.2_21mer_win1_26357 | 26357 | 26377 | 3013 | CTAACACACGCATGACGACGT | 3995 | TGCAGCAGTACGCACACAATC |
| NC_045512.2_21mer_win1_26358 | 26358 | 26378 | 3014 | TAACACACGCATGACGACGTT | 3996 | TTGCAGCAGTACGCACACAAT |
| NC_045512.2_21mer_win1_26359 | 26359 | 26379 | 3015 | AACACACGCATGACGACGTTA | 3997 | ATTGCAGCAGTACGCACACAA |
| NC_045512.2_21mer_win1_26360 | 26360 | 26380 | 3016 | ACACACGCATGACGACGTTAT | 3998 | TATTGCAGCAGTACGCACACA |
| NC_045512.2_21mer_win1_26361 | 26361 | 26381 | 3017 | CACACGCATGACGACGTTATA | 3999 | ATATTGCAGCAGTACGCACAC |
| NC_045512.2_21mer_win1_26362 | 26362 | 26382 | 3018 | ACACGCATGACGACGTTATAA | 4000 | AATATTGCAGCAGTACGCACA |
| NC_045512.2_21mer_win1_26363 | 26363 | 26383 | 3019 | CACGCATGACGACGTTATAAC | 4001 | CAATATTGCAGCAGTACGCAC |
| NC_045512.2_21mer_win1_26364 | 26364 | 26384 | 3020 | ACGCATGACGACGTTATAACA | 4002 | ACAATATTGCAGCAGTACGCA |
| NC_045512.2_21mer_win1_26365 | 26365 | 26385 | 3021 | CGCATGACGACGTTATAACAA | 4003 | AACAATATTGCAGCAGTACGC |
| NC_045512.2_21mer_win1_26366 | 26366 | 26386 | 3022 | GCATGACGACGTTATAACAAT | 4004 | TAACAATATTGCAGCAGTACG |
| NC_045512.2_21mer_win1_26367 | 26367 | 26387 | 3023 | CATGACGACGTTATAACAATT | 4005 | TTAACAATATTGCAGCAGTAC |
| NC_045512.2_21mer_win1_26368 | 26368 | 26388 | 3024 | ATGACGACGTTATAACAATTG | 4006 | GTTAACAATATTGCAGCAGTA |
| NC_045512.2_21mer_win1_26369 | 26369 | 26389 | 3025 | TGACGACGTTATAACAATTGC | 4007 | CGTTAACAATATTGCAGCAGT |
| NC_045512.2_21mer_win1_26370 | 26370 | 26390 | 3026 | GACGACGTTATAACAATTGCA | 4008 | ACGTTAACAATATTGCAGCAG |
| NC_045512.2_21mer_win1_26371 | 26371 | 26391 | 3027 | ACGACGTTATAACAATTGCAC | 4009 | CACGTTAACAATATTGCAGCA |
| NC_045512.2_21mer_win1_26372 | 26372 | 26392 | 3028 | CGACGTTATAACAATTGCACT | 4010 | TCACGTTAACAATATTGCAGC |
| NC_045512.2_21mer_win1_26373 | 26373 | 26393 | 3029 | GACGTTATAACAATTGCACTC | 4011 | CTCACGTTAACAATATTGCAG |
| NC_045512.2_21mer_win1_26374 | 26374 | 26394 | 3030 | ACGTTATAACAATTGCACTCA | 4012 | ACTCACGTTAACAATATTGCA |
| NC_045512.2_21mer_win1_26450 | 26450 | 26470 | 3031 | CTCAAGGACTAGAAGACCAGA | 4013 | AGACCAGAAGATCAGGAACTC |
| NC_045512.2_21mer_win1_26451 | 26451 | 26471 | 3032 | TCAAGGACTAGAAGACCAGAT | 4014 | TAGACCAGAAGATCAGGAACT |
| NC_045512.2_21mer_win1_26452 | 26452 | 26472 | 3033 | CAAGGACTAGAAGACCAGATT | 4015 | TTAGACCAGAAGATCAGGAAC |
| NC_045512.2_21mer_win1_26453 | 26453 | 26473 | 3034 | AAGGACTAGAAGACCAGATTT | 4016 | TTTAGACCAGAAGATCAGGAA |
| NC_045512.2_21mer_win1_26454 | 26454 | 26474 | 3035 | AGGACTAGAAGACCAGATTTG | 4017 | GTTTAGACCAGAAGATCAGGA |
| NC_045512.2_21mer_win1_26455 | 26455 | 26475 | 3036 | GGACTAGAAGACCAGATTTGC | 4018 | CGTTTAGACCAGAAGATCAGG |
| NC_045512.2_21mer_win1_26456 | 26456 | 26476 | 3037 | GACTAGAAGACCAGATTTGCT | 4019 | TCGTTTAGACCAGAAGATCAG |
| NC_045512.2_21mer_win1_26457 | 26457 | 26477 | 3038 | ACTAGAAGACCAGATTTGCTT | 4020 | TTCGTTTAGACCAGAAGATCA |
| NC_045512.2_21mer_win1_26458 | 26458 | 26478 | 3039 | CTAGAAGACCAGATTTGCTTG | 4021 | GTTCGTTTAGACCAGAAGATC |
| NC_045512.2_21mer_win1_26459 | 26459 | 26479 | 3040 | TAGAAGACCAGATTTGCTTGA | 4022 | AGTTCGTTTAGACCAGAAGAT |
| NC_045512.2_21mer_win1_26460 | 26460 | 26480 | 3041 | AGAAGACCAGATTTGCTTGAT | 4023 | TAGTTCGTTTAGACCAGAAGA |
| NC_045512.2_21mer_win1_26461 | 26461 | 26481 | 3042 | GAAGACCAGATTTGCTTGATT | 4024 | TTAGTTCGTTTAGACCAGAAG |
| NC_045512.2_21mer_win1_26574 | 26574 | 26594 | 3043 | CTTGTTACCTTGGATCATTAT | 4025 | TATTACTAGGTTCCATTGTTC |
| NC_045512.2_21mer_win1_26575 | 26575 | 26595 | 3044 | TTGTTACCTTGGATCATTATC | 4026 | CTATTACTAGGTTCCATTGTT |
| NC_045512.2_21mer_win1_26576 | 26576 | 26596 | 3045 | TGTTACCTTGGATCATTATCC | 4027 | CCTATTACTAGGTTCCATTGT |
| NC_045512.2_21mer_win1_26577 | 26577 | 26597 | 3046 | GTTACCTTGGATCATTATCCA | 4028 | ACCTATTACTAGGTTCCATTG |
| NC_045512.2_21mer_win1_26578 | 26578 | 26598 | 3047 | TTACCTTGGATCATTATCCAA | 4029 | AACCTATTACTAGGTTCCATT |
| NC_045512.2_21mer_win1_26579 | 26579 | 26599 | 3048 | TACCTTGGATCATTATCCAAA | 4030 | AAACCTATTACTAGGTTCCAT |
| NC_045512.2_21mer_win1_26580 | 26580 | 26600 | 3049 | ACCTTGGATCATTATCCAAAG | 4031 | GAAACCTATTACTAGGTTCCA |
| NC_045512.2_21mer_win1_27033 | 27033 | 27053 | 3050 | CGATGTAGTGCTTGCGAAAGA | 4032 | AGAAAGCGTTCGTGATGTAGC |
| NC_045512.2_21mer_win1_27034 | 27034 | 27054 | 3051 | GATGTAGTGCTTGCGAAAGAA | 4033 | AAGAAAGCGTTCGTGATGTAG |
| NC_045512.2_21mer_win1_27035 | 27035 | 27055 | 3052 | ATGTAGTGCTTGCGAAAGAAT | 4034 | TAAGAAAGCGTTCGTGATGTA |
| NC_045512.2_21mer_win1_27036 | 27036 | 27056 | 3053 | TGTAGTGCTTGCGAAAGAATA | 4035 | ATAAGAAAGCGTTCGTGATGT |
| NC_045512.2_21mer_win1_27037 | 27037 | 27057 | 3054 | GTAGTGCTTGCGAAAGAATAA | 4036 | AATAAGAAAGCGTTCGTGATG |
| NC_045512.2_21mer_win1_27038 | 27038 | 27058 | 3055 | TAGTGCTTGCGAAAGAATAAT | 4037 | TAATAAGAAAGCGTTCGTGAT |
| NC_045512.2_21mer_win1_27039 | 27039 | 27059 | 3056 | AGTGCTTGCGAAAGAATAATG | 4038 | GTAATAAGAAAGCGTTCGTGA |
| NC_045512.2_21mer_win1_27040 | 27040 | 27060 | 3057 | GTGCTTGCGAAAGAATAATGT | 4039 | TGTAATAAGAAAGCGTTCGTG |
| NC_045512.2_21mer_win1_27041 | 27041 | 27061 | 3058 | TGCTTGCGAAAGAATAATGTT | 4040 | TTGTAATAAGAAAGCGTTCGT |
| NC_045512.2_21mer_win1_27042 | 27042 | 27062 | 3059 | GCTTGCGAAAGAATAATGTTT | 4041 | TTTGTAATAAGAAAGCGTTCG |
| NC_045512.2_21mer_win1_27043 | 27043 | 27063 | 3060 | CTTGCGAAAGAATAATGTTTA | 4042 | ATTTGTAATAAGAAAGCGTTC |
| NC_045512.2_21mer_win1_27044 | 27044 | 27064 | 3061 | TTGCGAAAGAATAATGTTTAA | 4043 | AATTTGTAATAAGAAAGCGTT |
| NC_045512.2_21mer_win1_27183 | 27183 | 27203 | 3062 | CATGTCATTCACTGTTGTCTA | 4044 | ATCTGTTGTCACTTACTGTAC |
| NC_045512.2_21mer_win1_27184 | 27184 | 27204 | 3063 | ATGTCATTCACTGTTGTCTAC | 4045 | CATCTGTTGTCACTTACTGTA |
| NC_045512.2_21mer_win1_27185 | 27185 | 27205 | 3064 | TGTCATTCACTGTTGTCTACA | 4046 | ACATCTGTTGTCACTTACTGT |
| NC_045512.2_21mer_win1_27186 | 27186 | 27206 | 3065 | GTCATTCACTGTTGTCTACAA | 4047 | AACATCTGTTGTCACTTACTG |
| NC_045512.2_21mer_win1_27187 | 27187 | 27207 | 3066 | TCATTCACTGTTGTCTACAAA | 4048 | AAACATCTGTTGTCACTTACT |
| NC_045512.2_21mer_win1_27188 | 27188 | 27208 | 3067 | CATTCACTGTTGTCTACAAAG | 4049 | GAAACATCTGTTGTCACTTAC |
| NC_045512.2_21mer_win1_27189 | 27189 | 27209 | 3068 | ATTCACTGTTGTCTACAAAGT | 4050 | TGAAACATCTGTTGTCACTTA |
| NC_045512.2_21mer_win1_27190 | 27190 | 27210 | 3069 | TTCACTGTTGTCTACAAAGTA | 4051 | ATGAAACATCTGTTGTCACTT |
| NC_045512.2_21mer_win1_27191 | 27191 | 27211 | 3070 | TCACTGTTGTCTACAAAGTAG | 4052 | GATGAAACATCTGTTGTCACT |
| NC_045512.2_21mer_win1_27192 | 27192 | 27212 | 3071 | CACTGTTGTCTACAAAGTAGA | 4053 | AGATGAAACATCTGTTGTCAC |
| NC_045512.2_21mer_win1_27382 | 27382 | 27402 | 3072 | CTAATTTGCTTGTACTTTTAA | 4054 | AATTTTCATGTTCGTTTAATC |
| NC_045512.2_21mer_win1_27383 | 27383 | 27403 | 3073 | TAATTTGCTTGTACTTTTAAT | 4055 | TAATTTTCATGTTCGTTTAAT |
| NC_045512.2_21mer_win1_27384 | 27384 | 27404 | 3074 | AATTTGCTTGTACTTTTAATA | 4056 | ATAATTTTCATGTTCGTTTAA |
| NC_045512.2_21mer_win1_27385 | 27385 | 27405 | 3075 | ATTTGCTTGTACTTTTAATAA | 4057 | AATAATTTTCATGTTCGTTTA |
| NC_045512.2_21mer_win1_27386 | 27386 | 27406 | 3076 | TTTGCTTGTACTTTTAATAAG | 4058 | GAATAATTTTCATGTTCGTTT |
| NC_045512.2_21mer_win1_27387 | 27387 | 27407 | 3077 | TTGCTTGTACTTTTAATAAGA | 4059 | AGAATAATTTTCATGTTCGTT |
| NC_045512.2_21mer_win1_27511 | 27511 | 27531 | 3078 | ATGCTCCCGTTAAGTGGTAAA | 4060 | AAATGGTGAATTGCCCTCGTA |
| NC_045512.2_21mer_win1_27512 | 27512 | 27532 | 3079 | TGCTCCCGTTAAGTGGTAAAG | 4061 | GAAATGGTGAATTGCCCTCGT |
| NC_045512.2_21mer_win1_27513 | 27513 | 27533 | 3080 | GCTCCCGTTAAGTGGTAAAGT | 4062 | TGAAATGGTGAATTGCCCTCG |
| NC_045512.2_21mer_win1_27771 | 27771 | 27791 | 3081 | AATTAACTGAAGATAAACACG | 4063 | GCACAAATAGAAGTCAATTAA |
| NC_045512.2_21mer_win1_27772 | 27772 | 27792 | 3082 | ATTAACTGAAGATAAACACGA | 4064 | AGCACAAATAGAAGTCAATTA |
| NC_045512.2_21mer_win1_27773 | 27773 | 27793 | 3083 | TTAACTGAAGATAAACACGAA | 4065 | AAGCACAAATAGAAGTCAATT |
| NC_045512.2_21mer_win1_27774 | 27774 | 27794 | 3084 | TAACTGAAGATAAACACGAAA | 4066 | AAAGCACAAATAGAAGTCAAT |
| NC_045512.2_21mer_win1_27775 | 27775 | 27795 | 3085 | AACTGAAGATAAACACGAAAA | 4067 | AAAAGCACAAATAGAAGTCAA |
| NC_045512.2_21mer_win1_27776 | 27776 | 27796 | 3086 | ACTGAAGATAAACACGAAAAA | 4068 | AAAAAGCACAAATAGAAGTCA |
| NC_045512.2_21mer_win1_27777 | 27777 | 27797 | 3087 | CTGAAGATAAACACGAAAAAT | 4069 | TAAAAAGCACAAATAGAAGTC |
| NC_045512.2_21mer_win1_27778 | 27778 | 27798 | 3088 | TGAAGATAAACACGAAAAATC | 4070 | CTAAAAAGCACAAATAGAAGT |
| NC_045512.2_21mer_win1_27779 | 27779 | 27799 | 3089 | GAAGATAAACACGAAAAATCG | 4071 | GCTAAAAAGCACAAATAGAAG |
| NC_045512.2_21mer_win1_27780 | 27780 | 27800 | 3090 | AAGATAAACACGAAAAATCGG | 4072 | GGCTAAAAAGCACAAATAGAA |
| NC_045512.2_21mer_win1_27781 | 27781 | 27801 | 3091 | AGATAAACACGAAAAATCGGA | 4073 | AGGCTAAAAAGCACAAATAGA |
| NC_045512.2_21mer_win1_27782 | 27782 | 27802 | 3092 | GATAAACACGAAAAATCGGAA | 4074 | AAGGCTAAAAAGCACAAATAG |
| NC_045512.2_21mer_win1_27783 | 27783 | 27803 | 3093 | ATAAACACGAAAAATCGGAAA | 4075 | AAAGGCTAAAAAGCACAAATA |
| NC_045512.2_21mer_win1_27784 | 27784 | 27804 | 3094 | TAAACACGAAAAATCGGAAAG | 4076 | GAAAGGCTAAAAAGCACAAAT |
| NC_045512.2_21mer_win1_27785 | 27785 | 27805 | 3095 | AAACACGAAAAATCGGAAAGA | 4077 | AGAAAGGCTAAAAAGCACAAA |
| NC_045512.2_21mer_win1_27786 | 27786 | 27806 | 3096 | AACACGAAAAATCGGAAAGAC | 4078 | CAGAAAGGCTAAAAAGCACAA |
| NC_045512.2_21mer_win1_27787 | 27787 | 27807 | 3097 | ACACGAAAAATCGGAAAGACG | 4079 | GCAGAAAGGCTAAAAAGCACA |
| NC_045512.2_21mer_win1_27788 | 27788 | 27808 | 3098 | CACGAAAAATCGGAAAGACGA | 4080 | AGCAGAAAGGCTAAAAAGCAC |
| NC_045512.2_21mer_win1_27789 | 27789 | 27809 | 3099 | ACGAAAAATCGGAAAGACGAT | 4081 | TAGCAGAAAGGCTAAAAAGCA |
| NC_045512.2_21mer_win1_27790 | 27790 | 27810 | 3100 | CGAAAAATCGGAAAGACGATA | 4082 | ATAGCAGAAAGGCTAAAAAGC |
| NC_045512.2_21mer_win1_27791 | 27791 | 27811 | 3101 | GAAAAATCGGAAAGACGATAA | 4083 | AATAGCAGAAAGGCTAAAAAG |
| NC_045512.2_21mer_win1_27792 | 27792 | 27812 | 3102 | AAAAATCGGAAAGACGATAAG | 4084 | GAATAGCAGAAAGGCTAAAAA |
| NC_045512.2_21mer_win1_27793 | 27793 | 27813 | 3103 | AAAATCGGAAAGACGATAAGG | 4085 | GGAATAGCAGAAAGGCTAAAA |
| NC_045512.2_21mer_win1_27794 | 27794 | 27814 | 3104 | AAATCGGAAAGACGATAAGGA | 4086 | AGGAATAGCAGAAAGGCTAAA |
| NC_045512.2_21mer_win1_27795 | 27795 | 27815 | 3105 | AATCGGAAAGACGATAAGGAA | 4087 | AAGGAATAGCAGAAAGGCTAA |
| NC_045512.2_21mer_win1_27796 | 27796 | 27816 | 3106 | ATCGGAAAGACGATAAGGAAC | 4088 | CAAGGAATAGCAGAAAGGCTA |
| NC_045512.2_21mer_win1_27797 | 27797 | 27817 | 3107 | TCGGAAAGACGATAAGGAACA | 4089 | ACAAGGAATAGCAGAAAGGCT |
| NC_045512.2_21mer_win1_27798 | 27798 | 27818 | 3108 | CGGAAAGACGATAAGGAACAA | 4090 | AACAAGGAATAGCAGAAAGGC |
| NC_045512.2_21mer_win1_28270 | 28270 | 28290 | 3109 | ATTTTACAGACTATTACCTGG | 4091 | GGTCCATTATCAGACATTTTA |
| NC_045512.2_21mer_win1_28271 | 28271 | 28291 | 3110 | TTTTACAGACTATTACCTGGG | 4092 | GGGTCCATTATCAGACATTTT |
| NC_045512.2_21mer_win1_28272 | 28272 | 28292 | 3111 | TTTACAGACTATTACCTGGGG | 4093 | GGGGTCCATTATCAGACATTT |
| NC_045512.2_21mer_win1_28273 | 28273 | 28293 | 3112 | TTACAGACTATTACCTGGGGT | 4094 | TGGGGTCCATTATCAGACATT |
| NC_045512.2_21mer_win1_28274 | 28274 | 28294 | 3113 | TACAGACTATTACCTGGGGTT | 4095 | TTGGGGTCCATTATCAGACAT |
| NC_045512.2_21mer_win1_28275 | 28275 | 28295 | 3114 | ACAGACTATTACCTGGGGTTT | 4096 | TTTGGGGTCCATTATCAGACA |
| NC_045512.2_21mer_win1_28276 | 28276 | 28296 | 3115 | CAGACTATTACCTGGGGTTTT | 4097 | TTTTGGGGTCCATTATCAGAC |
| NC_045512.2_21mer_win1_28397 | 28397 | 28417 | 3116 | GGGGTTCCAAATGGGTTATTA | 4098 | ATTATTGGGTAAACCTTGGGG |
| NC_045512.2_21mer_win1_28398 | 28398 | 28418 | 3117 | GGGTTCCAAATGGGTTATTAT | 4099 | TATTATTGGGTAAACCTTGGG |
| NC_045512.2_21mer_win1_28399 | 28399 | 28419 | 3118 | GGTTCCAAATGGGTTATTATG | 4100 | GTATTATTGGGTAAACCTTGG |
| NC_045512.2_21mer_win1_28400 | 28400 | 28420 | 3119 | GTTCCAAATGGGTTATTATGA | 4101 | AGTATTATTGGGTAAACCTTG |
| NC_045512.2_21mer_win1_28401 | 28401 | 28421 | 3120 | TTCCAAATGGGTTATTATGAC | 4102 | CAGTATTATTGGGTAAACCTT |
| NC_045512.2_21mer_win1_28402 | 28402 | 28422 | 3121 | TCCAAATGGGTTATTATGACG | 4103 | GCAGTATTATTGGGTAAACCT |
| NC_045512.2_21mer_win1_28403 | 28403 | 28423 | 3122 | CCAAATGGGTTATTATGACGC | 4104 | CGCAGTATTATTGGGTAAACC |
| NC_045512.2_21mer_win1_28404 | 28404 | 28424 | 3123 | CAAATGGGTTATTATGACGCA | 4105 | ACGCAGTATTATTGGGTAAAC |
| NC_045512.2_21mer_win1_28405 | 28405 | 28425 | 3124 | AAATGGGTTATTATGACGCAG | 4106 | GACGCAGTATTATTGGGTAAA |
| NC_045512.2_21mer_win1_28406 | 28406 | 28426 | 3125 | AATGGGTTATTATGACGCAGA | 4107 | AGACGCAGTATTATTGGGTAA |
| NC_045512.2_21mer_win1_28407 | 28407 | 28427 | 3126 | ATGGGTTATTATGACGCAGAA | 4108 | AAGACGCAGTATTATTGGGTA |
| NC_045512.2_21mer_win1_28408 | 28408 | 28428 | 3127 | TGGGTTATTATGACGCAGAAC | 4109 | CAAGACGCAGTATTATTGGGT |
| NC_045512.2_21mer_win1_28409 | 28409 | 28429 | 3128 | GGGTTATTATGACGCAGAACC | 4110 | CCAAGACGCAGTATTATTGGG |
| NC_045512.2_21mer_win1_28410 | 28410 | 28430 | 3129 | GGTTATTATGACGCAGAACCA | 4111 | ACCAAGACGCAGTATTATTGG |
| NC_045512.2_21mer_win1_28411 | 28411 | 28431 | 3130 | GTTATTATGACGCAGAACCAA | 4112 | AACCAAGACGCAGTATTATTG |
| NC_045512.2_21mer_win1_28412 | 28412 | 28432 | 3131 | TTATTATGACGCAGAACCAAG | 4113 | GAACCAAGACGCAGTATTATT |
| NC_045512.2_21mer_win1_28413 | 28413 | 28433 | 3132 | TATTATGACGCAGAACCAAGT | 4114 | TGAACCAAGACGCAGTATTAT |
| NC_045512.2_21mer_win1_28414 | 28414 | 28434 | 3133 | ATTATGACGCAGAACCAAGTG | 4115 | GTGAACCAAGACGCAGTATTA |
| NC_045512.2_21mer_win1_28513 | 28513 | 28533 | 3134 | TCTACTGGTTTAACCGATGAT | 4116 | TAGTAGCCAATTTGGTCATCT |
| NC_045512.2_21mer_win1_28514 | 28514 | 28534 | 3135 | CTACTGGTTTAACCGATGATG | 4117 | GTAGTAGCCAATTTGGTCATC |
| NC_045512.2_21mer_win1_28515 | 28515 | 28535 | 3136 | TACTGGTTTAACCGATGATGG | 4118 | GGTAGTAGCCAATTTGGTCAT |
| NC_045512.2_21mer_win1_28516 | 28516 | 28536 | 3137 | ACTGGTTTAACCGATGATGGC | 4119 | CGGTAGTAGCCAATTTGGTCA |
| NC_045512.2_21mer_win1_28517 | 28517 | 28537 | 3138 | CTGGTTTAACCGATGATGGCT | 4120 | TCGGTAGTAGCCAATTTGGTC |
| NC_045512.2_21mer_win1_28518 | 28518 | 28538 | 3139 | TGGTTTAACCGATGATGGCTT | 4121 | TTCGGTAGTAGCCAATTTGGT |
| NC_045512.2_21mer_win1_28519 | 28519 | 28539 | 3140 | GGTTTAACCGATGATGGCTTC | 4122 | CTTCGGTAGTAGCCAATTTGG |
| NC_045512.2_21mer_win1_28520 | 28520 | 28540 | 3141 | GTTTAACCGATGATGGCTTCT | 4123 | TCTTCGGTAGTAGCCAATTTG |
| NC_045512.2_21mer_win1_28521 | 28521 | 28541 | 3142 | TTTAACCGATGATGGCTTCTC | 4124 | CTCTTCGGTAGTAGCCAATTT |
| NC_045512.2_21mer_win1_28522 | 28522 | 28542 | 3143 | TTAACCGATGATGGCTTCTCG | 4125 | GCTCTTCGGTAGTAGCCAATT |
| NC_045512.2_21mer_win1_28523 | 28523 | 28543 | 3144 | TAACCGATGATGGCTTCTCGA | 4126 | AGCTCTTCGGTAGTAGCCAAT |
| NC_045512.2_21mer_win1_28524 | 28524 | 28544 | 3145 | AACCGATGATGGCTTCTCGAT | 4127 | TAGCTCTTCGGTAGTAGCCAA |
| NC_045512.2_21mer_win1_28525 | 28525 | 28545 | 3146 | ACCGATGATGGCTTCTCGATG | 4128 | GTAGCTCTTCGGTAGTAGCCA |
| NC_045512.2_21mer_win1_28526 | 28526 | 28546 | 3147 | CCGATGATGGCTTCTCGATGG | 4129 | GGTAGCTCTTCGGTAGTAGCC |
| NC_045512.2_21mer_win1_28706 | 28706 | 28726 | 3148 | GTGTAACCGTGGGCGTTAGGA | 4130 | AGGATTGCGGGTGCCAATGTG |
| NC_045512.2_21mer_win1_28744 | 28744 | 28764 | 3149 | GCACGATGTTGAAGGAGTTCC | 4131 | CCTTGAGGAAGTTGTAGCACG |
| NC_045512.2_21mer_win1_28745 | 28745 | 28765 | 3150 | CACGATGTTGAAGGAGTTCCT | 4132 | TCCTTGAGGAAGTTGTAGCAC |
| NC_045512.2_21mer_win1_28746 | 28746 | 28766 | 3151 | ACGATGTTGAAGGAGTTCCTT | 4133 | TTCCTTGAGGAAGTTGTAGCA |
| NC_045512.2_21mer_win1_28747 | 28747 | 28767 | 3152 | CGATGTTGAAGGAGTTCCTTG | 4134 | GTTCCTTGAGGAAGTTGTAGC |
| NC_045512.2_21mer_win1_28748 | 28748 | 28768 | 3153 | GATGTTGAAGGAGTTCCTTGT | 4135 | TGTTCCTTGAGGAAGTTGTAG |
| NC_045512.2_21mer_win1_28749 | 28749 | 28769 | 3154 | ATGTTGAAGGAGTTCCTTGTT | 4136 | TTGTTCCTTGAGGAAGTTGTA |
| NC_045512.2_21mer_win1_28750 | 28750 | 28770 | 3155 | TGTTGAAGGAGTTCCTTGTTG | 4137 | GTTGTTCCTTGAGGAAGTTGT |
| NC_045512.2_21mer_win1_28751 | 28751 | 28771 | 3156 | GTTGAAGGAGTTCCTTGTTGT | 4138 | TGTTGTTCCTTGAGGAAGTTG |
| NC_045512.2_21mer_win1_28752 | 28752 | 28772 | 3157 | TTGAAGGAGTTCCTTGTTGTA | 4139 | ATGTTGTTCCTTGAGGAAGTT |
| NC_045512.2_21mer_win1_28753 | 28753 | 28773 | 3158 | TGAAGGAGTTCCTTGTTGTAA | 4140 | AATGTTGTTCCTTGAGGAAGT |
| NC_045512.2_21mer_win1_28754 | 28754 | 28774 | 3159 | GAAGGAGTTCCTTGTTGTAAC | 4141 | CAATGTTGTTCCTTGAGGAAG |
| NC_045512.2_21mer_win1_28755 | 28755 | 28775 | 3160 | AAGGAGTTCCTTGTTGTAACG | 4142 | GCAATGTTGTTCCTTGAGGAA |
| NC_045512.2_21mer_win1_28756 | 28756 | 28776 | 3161 | AGGAGTTCCTTGTTGTAACGG | 4143 | GGCAATGTTGTTCCTTGAGGA |
| NC_045512.2_21mer_win1_28757 | 28757 | 28777 | 3162 | GGAGTTCCTTGTTGTAACGGT | 4144 | TGGCAATGTTGTTCCTTGAGG |
| NC_045512.2_21mer_win1_28758 | 28758 | 28778 | 3163 | GAGTTCCTTGTTGTAACGGTT | 4145 | TTGGCAATGTTGTTCCTTGAG |
| NC_045512.2_21mer_win1_28759 | 28759 | 28779 | 3164 | AGTTCCTTGTTGTAACGGTTT | 4146 | TTTGGCAATGTTGTTCCTTGA |
| NC_045512.2_21mer_win1_28760 | 28760 | 28780 | 3165 | GTTCCTTGTTGTAACGGTTTT | 4147 | TTTTGGCAATGTTGTTCCTTG |
| NC_045512.2_21mer_win1_28761 | 28761 | 28781 | 3166 | TTCCTTGTTGTAACGGTTTTC | 4148 | CTTTTGGCAATGTTGTTCCTT |
| NC_045512.2_21mer_win1_28762 | 28762 | 28782 | 3167 | TCCTTGTTGTAACGGTTTTCC | 4149 | CCTTTTGGCAATGTTGTTCCT |
| NC_045512.2_21mer_win1_28763 | 28763 | 28783 | 3168 | CCTTGTTGTAACGGTTTTCCG | 4150 | GCCTTTTGGCAATGTTGTTCC |
| NC_045512.2_21mer_win1_28764 | 28764 | 28784 | 3169 | CTTGTTGTAACGGTTTTCCGA | 4151 | AGCCTTTTGGCAATGTTGTTC |
| NC_045512.2_21mer_win1_28765 | 28765 | 28785 | 3170 | TTGTTGTAACGGTTTTCCGAA | 4152 | AAGCCTTTTGGCAATGTTGTT |
| NC_045512.2_21mer_win1_28766 | 28766 | 28786 | 3171 | TGTTGTAACGGTTTTCCGAAG | 4153 | GAAGCCTTTTGGCAATGTTGT |
| NC_045512.2_21mer_win1_28767 | 28767 | 28787 | 3172 | GTTGTAACGGTTTTCCGAAGA | 4154 | AGAAGCCTTTTGGCAATGTTG |
| NC_045512.2_21mer_win1_28768 | 28768 | 28788 | 3173 | TTGTAACGGTTTTCCGAAGAT | 4155 | TAGAAGCCTTTTGGCAATGTT |
| NC_045512.2_21mer_win1_28769 | 28769 | 28789 | 3174 | TGTAACGGTTTTCCGAAGATG | 4156 | GTAGAAGCCTTTTGGCAATGT |
| NC_045512.2_21mer_win1_28770 | 28770 | 28790 | 3175 | GTAACGGTTTTCCGAAGATGC | 4157 | CGTAGAAGCCTTTTGGCAATG |
| NC_045512.2_21mer_win1_28771 | 28771 | 28791 | 3176 | TAACGGTTTTCCGAAGATGCG | 4158 | GCGTAGAAGCCTTTTGGCAAT |
| NC_045512.2_21mer_win1_28772 | 28772 | 28792 | 3177 | AACGGTTTTCCGAAGATGCGT | 4159 | TGCGTAGAAGCCTTTTGGCAA |
| NC_045512.2_21mer_win1_28773 | 28773 | 28793 | 3178 | ACGGTTTTCCGAAGATGCGTC | 4160 | CTGCGTAGAAGCCTTTTGGCA |
| NC_045512.2_21mer_win1_28774 | 28774 | 28794 | 3179 | CGGTTTTCCGAAGATGCGTCT | 4161 | TCTGCGTAGAAGCCTTTTGGC |
| NC_045512.2_21mer_win1_28799 | 28799 | 28819 | 3180 | TCGTCTCCGCCGTCAGTTCGG | 4162 | GGCTTGACTGCCGCCTCTGCT |
| NC_045512.2_21mer_win1_28800 | 28800 | 28820 | 3181 | CGTCTCCGCCGTCAGTTCGGA | 4163 | AGGCTTGACTGCCGCCTCTGC |
| NC_045512.2_21mer_win1_28801 | 28801 | 28821 | 3182 | GTCTCCGCCGTCAGTTCGGAG | 4164 | GAGGCTTGACTGCCGCCTCTG |
| NC_045512.2_21mer_win1_28802 | 28802 | 28822 | 3183 | TCTCCGCCGTCAGTTCGGAGA | 4165 | AGAGGCTTGACTGCCGCCTCT |
| NC_045512.2_21mer_win1_28803 | 28803 | 28823 | 3184 | CTCCGCCGTCAGTTCGGAGAA | 4166 | AAGAGGCTTGACTGCCGCCTC |
| NC_045512.2_21mer_win1_28804 | 28804 | 28824 | 3185 | TCCGCCGTCAGTTCGGAGAAG | 4167 | GAAGAGGCTTGACTGCCGCCT |
| NC_045512.2_21mer_win1_28805 | 28805 | 28825 | 3186 | CCGCCGTCAGTTCGGAGAAGA | 4168 | AGAAGAGGCTTGACTGCCGCC |
| NC_045512.2_21mer_win1_28806 | 28806 | 28826 | 3187 | CGCCGTCAGTTCGGAGAAGAG | 4169 | GAGAAGAGGCTTGACTGCCGC |
| NC_045512.2_21mer_win1_28807 | 28807 | 28827 | 3188 | GCCGTCAGTTCGGAGAAGAGC | 4170 | CGAGAAGAGGCTTGACTGCCG |
| NC_045512.2_21mer_win1_28946 | 28946 | 28966 | 3189 | CTGTCTAACTTGGTCGAACTC | 4171 | CTCAAGCTGGTTCAATCTGTC |
| NC_045512.2_21mer_win1_28947 | 28947 | 28967 | 3190 | TGTCTAACTTGGTCGAACTCT | 4172 | TCTCAAGCTGGTTCAATCTGT |
| NC_045512.2_21mer_win1_28948 | 28948 | 28968 | 3191 | GTCTAACTTGGTCGAACTCTC | 4173 | CTCTCAAGCTGGTTCAATCTG |
| NC_045512.2_21mer_win1_28949 | 28949 | 28969 | 3192 | TCTAACTTGGTCGAACTCTCG | 4174 | GCTCTCAAGCTGGTTCAATCT |
| NC_045512.2_21mer_win1_28950 | 28950 | 28970 | 3193 | CTAACTTGGTCGAACTCTCGT | 4175 | TGCTCTCAAGCTGGTTCAATC |
| NC_045512.2_21mer_win1_28951 | 28951 | 28971 | 3194 | TAACTTGGTCGAACTCTCGTT | 4176 | TTGCTCTCAAGCTGGTTCAAT |
| NC_045512.2_21mer_win1_28952 | 28952 | 28972 | 3195 | AACTTGGTCGAACTCTCGTTT | 4177 | TTTGCTCTCAAGCTGGTTCAA |
| NC_045512.2_21mer_win1_28976 | 28976 | 28996 | 3196 | AGACCATTTCCGGTTGTTGTT | 4178 | TTGTTGTTGGCCTTTACCAGA |
| NC_045512.2_21mer_win1_28977 | 28977 | 28997 | 3197 | GACCATTTCCGGTTGTTGTTG | 4179 | GTTGTTGTTGGCCTTTACCAG |
| NC_045512.2_21mer_win1_28978 | 28978 | 28998 | 3198 | ACCATTTCCGGTTGTTGTTGT | 4180 | TGTTGTTGTTGGCCTTTACCA |
| NC_045512.2_21mer_win1_28979 | 28979 | 28999 | 3199 | CCATTTCCGGTTGTTGTTGTT | 4181 | TTGTTGTTGTTGGCCTTTACC |
| NC_045512.2_21mer_win1_28980 | 28980 | 29000 | 3200 | CATTTCCGGTTGTTGTTGTTC | 4182 | CTTGTTGTTGTTGGCCTTTAC |
| NC_045512.2_21mer_win1_28981 | 28981 | 29001 | 3201 | ATTTCCGGTTGTTGTTGTTCC | 4183 | CCTTGTTGTTGTTGGCCTTTA |
| NC_045512.2_21mer_win1_28982 | 28982 | 29002 | 3202 | TTTCCGGTTGTTGTTGTTCCG | 4184 | GCCTTGTTGTTGTTGGCCTTT |
| NC_045512.2_21mer_win1_28983 | 28983 | 29003 | 3203 | TTCCGGTTGTTGTTGTTCCGG | 4185 | GGCCTTGTTGTTGTTGGCCTT |
| NC_045512.2_21mer_win1_28984 | 28984 | 29004 | 3204 | TCCGGTTGTTGTTGTTCCGGT | 4186 | TGGCCTTGTTGTTGTTGGCCT |
| NC_045512.2_21mer_win1_28985 | 28985 | 29005 | 3205 | CCGGTTGTTGTTGTTCCGGTT | 4187 | TTGGCCTTGTTGTTGTTGGCC |
| NC_045512.2_21mer_win1_28986 | 28986 | 29006 | 3206 | CGGTTGTTGTTGTTCCGGTTT | 4188 | TTTGGCCTTGTTGTTGTTGGC |
| NC_045512.2_21mer_win1_28987 | 28987 | 29007 | 3207 | GGTTGTTGTTGTTCCGGTTTG | 4189 | GTTTGGCCTTGTTGTTGTTGG |
| NC_045512.2_21mer_win1_28988 | 28988 | 29008 | 3208 | GTTGTTGTTGTTCCGGTTTGA | 4190 | AGTTTGGCCTTGTTGTTGTTG |
| NC_045512.2_21mer_win1_28989 | 28989 | 29009 | 3209 | TTGTTGTTGTTCCGGTTTGAC | 4191 | CAGTTTGGCCTTGTTGTTGTT |
| NC_045512.2_21mer_win1_28990 | 28990 | 29010 | 3210 | TGTTGTTGTTCCGGTTTGACA | 4192 | ACAGTTTGGCCTTGTTGTTGT |
| NC_045512.2_21mer_win1_28991 | 28991 | 29011 | 3211 | GTTGTTGTTCCGGTTTGACAG | 4193 | GACAGTTTGGCCTTGTTGTTG |
| NC_045512.2_21mer_win1_28992 | 28992 | 29012 | 3212 | TTGTTGTTCCGGTTTGACAGT | 4194 | TGACAGTTTGGCCTTGTTGTT |
| NC_045512.2_21mer_win1_28993 | 28993 | 29013 | 3213 | TGTTGTTCCGGTTTGACAGTG | 4195 | GTGACAGTTTGGCCTTGTTGT |
| NC_045512.2_21mer_win1_28994 | 28994 | 29014 | 3214 | GTTGTTCCGGTTTGACAGTGA | 4196 | AGTGACAGTTTGGCCTTGTTG |
| NC_045512.2_21mer_win1_28995 | 28995 | 29015 | 3215 | TTGTTCCGGTTTGACAGTGAT | 4197 | TAGTGACAGTTTGGCCTTGTT |
| NC_045512.2_21mer_win1_28996 | 28996 | 29016 | 3216 | TGTTCCGGTTTGACAGTGATT | 4198 | TTAGTGACAGTTTGGCCTTGT |
| NC_045512.2_21mer_win1_28997 | 28997 | 29017 | 3217 | GTTCCGGTTTGACAGTGATTC | 4199 | CTTAGTGACAGTTTGGCCTTG |
| NC_045512.2_21mer_win1_28998 | 28998 | 29018 | 3218 | TTCCGGTTTGACAGTGATTCT | 4200 | TCTTAGTGACAGTTTGGCCTT |
| NC_045512.2_21mer_win1_28999 | 28999 | 29019 | 3219 | TCCGGTTTGACAGTGATTCTT | 4201 | TTCTTAGTGACAGTTTGGCCT |
| NC_045512.2_21mer_win1_29000 | 29000 | 29020 | 3220 | CCGGTTTGACAGTGATTCTTT | 4202 | TTTCTTAGTGACAGTTTGGCC |
| NC_045512.2_21mer_win1_29001 | 29001 | 29021 | 3221 | CGGTTTGACAGTGATTCTTTA | 4203 | ATTTCTTAGTGACAGTTTGGC |
| NC_045512.2_21mer_win1_29002 | 29002 | 29022 | 3222 | GGTTTGACAGTGATTCTTTAG | 4204 | GATTTCTTAGTGACAGTTTGG |
| NC_045512.2_21mer_win1_29003 | 29003 | 29023 | 3223 | GTTTGACAGTGATTCTTTAGA | 4205 | AGATTTCTTAGTGACAGTTTG |
| NC_045512.2_21mer_win1_29004 | 29004 | 29024 | 3224 | TTTGACAGTGATTCTTTAGAC | 4206 | CAGATTTCTTAGTGACAGTTT |
| NC_045512.2_21mer_win1_29005 | 29005 | 29025 | 3225 | TTGACAGTGATTCTTTAGACG | 4207 | GCAGATTTCTTAGTGACAGTT |
| NC_045512.2_21mer_win1_29006 | 29006 | 29026 | 3226 | TGACAGTGATTCTTTAGACGA | 4208 | AGCAGATTTCTTAGTGACAGT |
| NC_045512.2_21mer_win1_29007 | 29007 | 29027 | 3227 | GACAGTGATTCTTTAGACGAC | 4209 | CAGCAGATTTCTTAGTGACAG |
| NC_045512.2_21mer_win1_29008 | 29008 | 29028 | 3228 | ACAGTGATTCTTTAGACGACG | 4210 | GCAGCAGATTTCTTAGTGACA |
| NC_045512.2_21mer_win1_29009 | 29009 | 29029 | 3229 | CAGTGATTCTTTAGACGACGA | 4211 | AGCAGCAGATTTCTTAGTGAC |
| NC_045512.2_21mer_win1_29010 | 29010 | 29030 | 3230 | AGTGATTCTTTAGACGACGAC | 4212 | CAGCAGCAGATTTCTTAGTGA |
| NC_045512.2_21mer_win1_29011 | 29011 | 29031 | 3231 | GTGATTCTTTAGACGACGACT | 4213 | TCAGCAGCAGATTTCTTAGTG |
| NC_045512.2_21mer_win1_29012 | 29012 | 29032 | 3232 | TGATTCTTTAGACGACGACTC | 4214 | CTCAGCAGCAGATTTCTTAGT |
| NC_045512.2_21mer_win1_29013 | 29013 | 29033 | 3233 | GATTCTTTAGACGACGACTCC | 4215 | CCTCAGCAGCAGATTTCTTAG |
| NC_045512.2_21mer_win1_29014 | 29014 | 29034 | 3234 | ATTCTTTAGACGACGACTCCG | 4216 | GCCTCAGCAGCAGATTTCTTA |
| NC_045512.2_21mer_win1_29144 | 29144 | 29164 | 3235 | GATTAGTCTGTTCCTTGACTA | 4217 | ATCAGTTCCTTGTCTGATTAG |
| NC_045512.2_21mer_win1_29145 | 29145 | 29165 | 3236 | ATTAGTCTGTTCCTTGACTAA | 4218 | AATCAGTTCCTTGTCTGATTA |
| NC_045512.2_21mer_win1_29146 | 29146 | 29166 | 3237 | TTAGTCTGTTCCTTGACTAAT | 4219 | TAATCAGTTCCTTGTCTGATT |
| NC_045512.2_21mer_win1_29147 | 29147 | 29167 | 3238 | TAGTCTGTTCCTTGACTAATG | 4220 | GTAATCAGTTCCTTGTCTGAT |
| NC_045512.2_21mer_win1_29148 | 29148 | 29168 | 3239 | AGTCTGTTCCTTGACTAATGT | 4221 | TGTAATCAGTTCCTTGTCTGA |
| NC_045512.2_21mer_win1_29149 | 29149 | 29169 | 3240 | GTCTGTTCCTTGACTAATGTT | 4222 | TTGTAATCAGTTCCTTGTCTG |
| NC_045512.2_21mer_win1_29150 | 29150 | 29170 | 3241 | TCTGTTCCTTGACTAATGTTT | 4223 | TTTGTAATCAGTTCCTTGTCT |
| NC_045512.2_21mer_win1_29151 | 29151 | 29171 | 3242 | CTGTTCCTTGACTAATGTTTG | 4224 | GTTTGTAATCAGTTCCTTGTC |
| NC_045512.2_21mer_win1_29152 | 29152 | 29172 | 3243 | TGTTCCTTGACTAATGTTTGT | 4225 | TGTTTGTAATCAGTTCCTTGT |
| NC_045512.2_21mer_win1_29174 | 29174 | 29194 | 3244 | ACCGGCGTTTAACGTGTTAAA | 4226 | AAATTGTGCAATTTGCGGCCA |
| NC_045512.2_21mer_win1_29175 | 29175 | 29195 | 3245 | CCGGCGTTTAACGTGTTAAAC | 4227 | CAAATTGTGCAATTTGCGGCC |
| NC_045512.2_21mer_win1_29176 | 29176 | 29196 | 3246 | CGGCGTTTAACGTGTTAAACG | 4228 | GCAAATTGTGCAATTTGCGGC |
| NC_045512.2_21mer_win1_29228 | 29228 | 29248 | 3247 | GCGTAACCGTACCTTCAGTGT | 4229 | TGTGACTTCCATGCCAATGCG |
| NC_045512.2_21mer_win1_29229 | 29229 | 29249 | 3248 | CGTAACCGTACCTTCAGTGTG | 4230 | GTGTGACTTCCATGCCAATGC |
| NC_045512.2_21mer_win1_29230 | 29230 | 29250 | 3249 | GTAACCGTACCTTCAGTGTGG | 4231 | GGTGTGACTTCCATGCCAATG |
| NC_045512.2_21mer_win1_29231 | 29231 | 29251 | 3250 | TAACCGTACCTTCAGTGTGGA | 4232 | AGGTGTGACTTCCATGCCAAT |
| NC_045512.2_21mer_win1_29232 | 29232 | 29252 | 3251 | AACCGTACCTTCAGTGTGGAA | 4233 | AAGGTGTGACTTCCATGCCAA |
| NC_045512.2_21mer_win1_29233 | 29233 | 29253 | 3252 | ACCGTACCTTCAGTGTGGAAG | 4234 | GAAGGTGTGACTTCCATGCCA |
| NC_045512.2_21mer_win1_29234 | 29234 | 29254 | 3253 | CCGTACCTTCAGTGTGGAAGC | 4235 | CGAAGGTGTGACTTCCATGCC |
| NC_045512.2_21mer_win1_29235 | 29235 | 29255 | 3254 | CGTACCTTCAGTGTGGAAGCC | 4236 | CCGAAGGTGTGACTTCCATGC |
| NC_045512.2_21mer_win1_29236 | 29236 | 29256 | 3255 | GTACCTTCAGTGTGGAAGCCC | 4237 | CCCGAAGGTGTGACTTCCATG |
| NC_045512.2_21mer_win1_29237 | 29237 | 29257 | 3256 | TACCTTCAGTGTGGAAGCCCT | 4238 | TCCCGAAGGTGTGACTTCCAT |
| NC_045512.2_21mer_win1_29238 | 29238 | 29258 | 3257 | ACCTTCAGTGTGGAAGCCCTT | 4239 | TTCCCGAAGGTGTGACTTCCA |
| NC_045512.2_21mer_win1_29239 | 29239 | 29259 | 3258 | CCTTCAGTGTGGAAGCCCTTG | 4240 | GTTCCCGAAGGTGTGACTTCC |
| NC_045512.2_21mer_win1_29285 | 29285 | 29305 | 3259 | TTTAACCTACTGTTTCTAGGT | 4241 | TGGATCTTTGTCATCCAATTT |
| NC_045512.2_21mer_win1_29342 | 29342 | 29362 | 3260 | TAACTGCGTATGTTTTGTAAG | 4242 | GAATGTTTTGTATGCGTCAAT |
| NC_045512.2_21mer_win1_29343 | 29343 | 29363 | 3261 | AACTGCGTATGTTTTGTAAGG | 4243 | GGAATGTTTTGTATGCGTCAA |
| NC_045512.2_21mer_win1_29344 | 29344 | 29364 | 3262 | ACTGCGTATGTTTTGTAAGGG | 4244 | GGGAATGTTTTGTATGCGTCA |
| NC_045512.2_21mer_win1_29345 | 29345 | 29365 | 3263 | CTGCGTATGTTTTGTAAGGGT | 4245 | TGGGAATGTTTTGTATGCGTC |
| NC_045512.2_21mer_win1_29346 | 29346 | 29366 | 3264 | TGCGTATGTTTTGTAAGGGTG | 4246 | GTGGGAATGTTTTGTATGCGT |
| NC_045512.2_21mer_win1_29347 | 29347 | 29367 | 3265 | GCGTATGTTTTGTAAGGGTGG | 4247 | GGTGGGAATGTTTTGTATGCG |
| NC_045512.2_21mer_win1_29348 | 29348 | 29368 | 3266 | CGTATGTTTTGTAAGGGTGGT | 4248 | TGGTGGGAATGTTTTGTATGC |
| NC_045512.2_21mer_win1_29349 | 29349 | 29369 | 3267 | GTATGTTTTGTAAGGGTGGTT | 4249 | TTGGTGGGAATGTTTTGTATG |
| NC_045512.2_21mer_win1_29350 | 29350 | 29370 | 3268 | TATGTTTTGTAAGGGTGGTTG | 4250 | GTTGGTGGGAATGTTTTGTAT |
| NC_045512.2_21mer_win1_29351 | 29351 | 29371 | 3269 | ATGTTTTGTAAGGGTGGTTGT | 4251 | TGTTGGTGGGAATGTTTTGTA |
| NC_045512.2_21mer_win1_29352 | 29352 | 29372 | 3270 | TGTTTTGTAAGGGTGGTTGTC | 4252 | CTGTTGGTGGGAATGTTTTGT |
| NC_045512.2_21mer_win1_29353 | 29353 | 29373 | 3271 | GTTTTGTAAGGGTGGTTGTCT | 4253 | TCTGTTGGTGGGAATGTTTTG |
| NC_045512.2_21mer_win1_29354 | 29354 | 29374 | 3272 | TTTTGTAAGGGTGGTTGTCTC | 4254 | CTCTGTTGGTGGGAATGTTTT |
| NC_045512.2_21mer_win1_29355 | 29355 | 29375 | 3273 | TTTGTAAGGGTGGTTGTCTCG | 4255 | GCTCTGTTGGTGGGAATGTTT |
| NC_045512.2_21mer_win1_29356 | 29356 | 29376 | 3274 | TTGTAAGGGTGGTTGTCTCGG | 4256 | GGCTCTGTTGGTGGGAATGTT |
| NC_045512.2_21mer_win1_29357 | 29357 | 29377 | 3275 | TGTAAGGGTGGTTGTCTCGGA | 4257 | AGGCTCTGTTGGTGGGAATGT |
| NC_045512.2_21mer_win1_29358 | 29358 | 29378 | 3276 | GTAAGGGTGGTTGTCTCGGAT | 4258 | TAGGCTCTGTTGGTGGGAATG |
| NC_045512.2_21mer_win1_29359 | 29359 | 29379 | 3277 | TAAGGGTGGTTGTCTCGGATT | 4259 | TTAGGCTCTGTTGGTGGGAAT |
| NC_045512.2_21mer_win1_29360 | 29360 | 29380 | 3278 | AAGGGTGGTTGTCTCGGATTT | 4260 | TTTAGGCTCTGTTGGTGGGAA |
| NC_045512.2_2lmer_win1_29361 | 29361 | 29381 | 3279 | AGGGTGGTTGTCTCGGATTTT | 4261 | TTTTAGGCTCTGTTGGTGGGA |
| NC_045512.2_21mer_win1_29362 | 29362 | 29382 | 3280 | GGGTGGTTGTCTCGGATTTTT | 4262 | TTTTTAGGCTCTGTTGGTGGG |
| NC_045512.2_21mer_win1_29363 | 29363 | 29383 | 3281 | GGTGGTTGTCTCGGATTTTTC | 4263 | CTTTTTAGGCTCTGTTGGTGG |
| NC_045512.2_21mer_win1_29364 | 29364 | 29384 | 3282 | GTGGTTGTCTCGGATTTTTCC | 4264 | CCTTTTTAGGCTCTGTTGGTG |
| NC_045512.2_21mer_win1_29365 | 29365 | 29385 | 3283 | TGGTTGTCTCGGATTTTTCCT | 4265 | TCCTTTTTAGGCTCTGTTGGT |
| NC_045512.2_21mer_win1_29366 | 29366 | 29386 | 3284 | GGTTGTCTCGGATTTTTCCTG | 4266 | GTCCTTTTTAGGCTCTGTTGG |
| NC_045512.2_21mer_win1_29367 | 29367 | 29387 | 3285 | GTTGTCTCGGATTTTTCCTGT | 4267 | TGTCCTTTTTAGGCTCTGTTG |
| NC_045512.2_21mer_win1_29368 | 29368 | 29388 | 3286 | TTGTCTCGGATTTTTCCTGTT | 4268 | TTGTCCTTTTTAGGCTCTGTT |
| NC_045512.2_21mer_win1_29369 | 29369 | 29389 | 3287 | TGTCTCGGATTTTTCCTGTTT | 4269 | TTTGTCCTTTTTAGGCTCTGT |
| NC_045512.2_21mer_win1_29370 | 29370 | 29390 | 3288 | GTCTCGGATTTTTCCTGTTTT | 4270 | TTTTGTCCTTTTTAGGCTCTG |
| NC_045512.2_2lmer_win1_29371 | 29371 | 29391 | 3289 | TCTCGGATTTTTCCTGTTTTT | 4271 | TTTTTGTCCTTTTTAGGCTCT |
| NC_045512.2_21mer_win1_29372 | 29372 | 29392 | 3290 | CTCGGATTTTTCCTGTTTTTC | 4272 | CTTTTTGTCCTTTTTAGGCTC |
| NC_045512.2_21mer_win1_29373 | 29373 | 29393 | 3291 | TCGGATTTTTCCTGTTTTTCT | 4273 | TCTTTTTGTCCTTTTTAGGCT |
| NC_045512.2_21mer_win1_29374 | 29374 | 29394 | 3292 | CGGATTTTTCCTGTTTTTCTT | 4274 | TTCTTTTTGTCCTTTTTAGGC |
| NC_045512.2_21mer_win1_29543 | 29543 | 29563 | 3293 | CTGGTGTGTTCCGTCTACCCG | 4275 | GCCCATCTGCCTTGTGTGGTC |
| NC_045512.2_21mer_win1_29544 | 29544 | 29564 | 3294 | TGGTGTGTTCCGTCTACCCGA | 4276 | AGCCCATCTGCCTTGTGTGGT |
| NC_045512.2_21mer_win1_29545 | 29545 | 29565 | 3295 | GGTGTGTTCCGTCTACCCGAT | 4277 | TAGCCCATCTGCCTTGTGTGG |
| NC_045512.2_21mer_win1_29546 | 29546 | 29566 | 3296 | GTGTGTTCCGTCTACCCGATA | 4278 | ATAGCCCATCTGCCTTGTGTG |
| NC_045512.2_21mer_win1_29598 | 29598 | 29618 | 3297 | TATCAGATGAGAACACGTCTT | 4279 | TTCTGCACAAGAGTAGACTAT |
| NC_045512.2_21mer_win1_29599 | 29599 | 29619 | 3298 | ATCAGATGAGAACACGTCTTA | 4280 | ATTCTGCACAAGAGTAGACTA |
| NC_045512.2_21mer_win1_29600 | 29600 | 29620 | 3299 | TCAGATGAGAACACGTCTTAC | 4281 | CATTCTGCACAAGAGTAGACT |
| NC_045512.2_21mer_win1_29601 | 29601 | 29621 | 3300 | CAGATGAGAACACGTCTTACT | 4282 | TCATTCTGCACAAGAGTAGAC |
| NC_045512.2_21mer_win1_29602 | 29602 | 29622 | 3301 | AGATGAGAACACGTCTTACTT | 4283 | TTCATTCTGCACAAGAGTAGA |
| NC_045512.2_21mer_win1_29603 | 29603 | 29623 | 3302 | GATGAGAACACGTCTTACTTA | 4284 | ATTCATTCTGCACAAGAGTAG |
| NC_045512.2_21mer_win1_29604 | 29604 | 29624 | 3303 | ATGAGAACACGTCTTACTTAA | 4285 | AATTCATTCTGCACAAGAGTA |
| NC_045512.2_21mer_win1_29605 | 29605 | 29625 | 3304 | TGAGAACACGTCTTACTTAAG | 4286 | GAATTCATTCTGCACAAGAGT |
| NC_045512.2_21mer_win1_29606 | 29606 | 29626 | 3305 | GAGAACACGTCTTACTTAAGA | 4287 | AGAATTCATTCTGCACAAGAG |
| NC_045512.2_21mer_win1_29607 | 29607 | 29627 | 3306 | AGAACACGTCTTACTTAAGAG | 4288 | GAGAATTCATTCTGCACAAGA |
| NC_045512.2_21mer_win1_29608 | 29608 | 29628 | 3307 | GAACACGTCTTACTTAAGAGC | 4289 | CGAGAATTCATTCTGCACAAG |
| NC_045512.2_21mer_win1_29609 | 29609 | 29629 | 3308 | AACACGTCTTACTTAAGAGCA | 4290 | ACGAGAATTCATTCTGCACAA |
| NC_045512.2_21mer_win1_29610 | 29610 | 29630 | 3309 | ACACGTCTTACTTAAGAGCAT | 4291 | TACGAGAATTCATTCTGCACA |
| NC_045512.2_21mer_win1_29652 | 29652 | 29672 | 3310 | ATCAATTGAAATTAGAGTGTA | 4292 | ATGTGAGATTAAAGTTAACTA |
| NC_045512.2_21mer_win1_29653 | 29653 | 29673 | 3311 | TCAATTGAAATTAGAGTGTAT | 4293 | TATGTGAGATTAAAGTTAACT |
| NC_045512.2_21mer_win1_29654 | 29654 | 29674 | 3312 | CAATTGAAATTAGAGTGTATC | 4294 | CTATGTGAGATTAAAGTTAAC |
| NC_045512.2_21mer_win1_29655 | 29655 | 29675 | 3313 | AATTGAAATTAGAGTGTATCG | 4295 | GCTATGTGAGATTAAAGTTAA |
| NC_045512.2_21mer_win1_29656 | 29656 | 29676 | 3314 | ATTGAAATTAGAGTGTATCGT | 4296 | TGCTATGTGAGATTAAAGTTA |
| NC_045512.2_21mer_win1_29657 | 29657 | 29677 | 3315 | TTGAAATTAGAGTGTATCGTT | 4297 | TTGCTATGTGAGATTAAAGTT |
| NC_045512.2_21mer_win1_29658 | 29658 | 29678 | 3316 | TGAAATTAGAGTGTATCGTTA | 4298 | ATTGCTATGTGAGATTAAAGT |
| NC_045512.2_21mer_win1_29659 | 29659 | 29679 | 3317 | GAAATTAGAGTGTATCGTTAG | 4299 | GATTGCTATGTGAGATTAAAG |
| NC_045512.2_21mer_win1_29660 | 29660 | 29680 | 3318 | AAATTAGAGTGTATCGTTAGA | 4300 | AGATTGCTATGTGAGATTAAA |
| NC_045512.2_21mer_win1_29661 | 29661 | 29681 | 3319 | AATTAGAGTGTATCGTTAGAA | 4301 | AAGATTGCTATGTGAGATTAA |
| NC_045512.2_21mer_win1_29662 | 29662 | 29682 | 3320 | ATTAGAGTGTATCGTTAGAAA | 4302 | AAAGATTGCTATGTGAGATTA |
| NC_045512.2_21mer_win1_29663 | 29663 | 29683 | 3321 | TTAGAGTGTATCGTTAGAAAT | 4303 | TAAAGATTGCTATGTGAGATT |
| NC_045512.2_21mer_win1_29664 | 29664 | 29684 | 3322 | TAGAGTGTATCGTTAGAAATT | 4304 | TTAAAGATTGCTATGTGAGAT |
| NC_045512.2_21mer_win1_29665 | 29665 | 29685 | 3323 | AGAGTGTATCGTTAGAAATTA | 4305 | ATTAAAGATTGCTATGTGAGA |
| NC_045512.2_21mer_win1_29666 | 29666 | 29686 | 3324 | GAGTGTATCGTTAGAAATTAG | 4306 | GATTAAAGATTGCTATGTGAG |
| NC_045512.2_21mer_win1_29667 | 29667 | 29687 | 3325 | AGTGTATCGTTAGAAATTAGT | 4307 | TGATTAAAGATTGCTATGTGA |
| NC_045512.2_21mer_win1_29689 | 29689 | 29709 | 3326 | ACACATTGTAATCCCTCCTGA | 4308 | AGTCCTCCCTAATGTTACACA |
| NC_045512.2_21mer_win1_29690 | 29690 | 29710 | 3327 | CACATTGTAATCCCTCCTGAA | 4309 | AAGTCCTCCCTAATGTTACAC |
| NC_045512.2_21mer_win1_29691 | 29691 | 29711 | 3328 | ACATTGTAATCCCTCCTGAAC | 4310 | CAAGTCCTCCCTAATGTTACA |
| NC_045512.2_21mer_win1_29692 | 29692 | 29712 | 3329 | CATTGTAATCCCTCCTGAACT | 4311 | TCAAGTCCTCCCTAATGTTAC |
| NC_045512.2_21mer_win1_29693 | 29693 | 29713 | 3330 | ATTGTAATCCCTCCTGAACTT | 4312 | TTCAAGTCCTCCCTAATGTTA |
| NC_045512.2_21mer_win1_29694 | 29694 | 29714 | 3331 | TTGTAATCCCTCCTGAACTTT | 4313 | TTTCAAGTCCTCCCTAATGTT |
| NC_045512.2_21mer_win1_29695 | 29695 | 29715 | 3332 | TGTAATCCCTCCTGAACTTTC | 4314 | CTTTCAAGTCCTCCCTAATGT |
| NC_045512.2_21mer_win1_29696 | 29696 | 29716 | 3333 | GTAATCCCTCCTGAACTTTCT | 4315 | TCTTTCAAGTCCTCCCTAATG |
| NC_045512.2_21mer_win1_29697 | 29697 | 29717 | 3334 | TAATCCCTCCTGAACTTTCTC | 4316 | CTCTTTCAAGTCCTCCCTAAT |
| NC_045512.2_21mer_win1_29698 | 29698 | 29718 | 3335 | AATCCCTCCTGAACTTTCTCG | 4317 | GCTCTTTCAAGTCCTCCCTAA |
| NC_045512.2_21mer_win1_29699 | 29699 | 29719 | 3336 | ATCCCTCCTGAACTTTCTCGG | 4318 | GGCTCTTTCAAGTCCTCCCTA |
| NC_045512.2_21mer_win1_29700 | 29700 | 29720 | 3337 | TCCCTCCTGAACTTTCTCGGT | 4319 | TGGCTCTTTCAAGTCCTCCCT |
| NC_045512.2_21mer_win1_29701 | 29701 | 29721 | 3338 | CCCTCCTGAACTTTCTCGGTG | 4320 | GTGGCTCTTTCAAGTCCTCCC |
| NC_045512.2_21mer_win1_29702 | 29702 | 29722 | 3339 | CCTCCTGAACTTTCTCGGTGG | 4321 | GGTGGCTCTTTCAAGTCCTCC |
| NC_045512.2_21mer_win1_29703 | 29703 | 29723 | 3340 | CTCCTGAACTTTCTCGGTGGT | 4322 | TGGTGGCTCTTTCAAGTCCTC |
| NC_045512.2_21mer_win1_29704 | 29704 | 29724 | 3341 | TCCTGAACTTTCTCGGTGGTG | 4323 | GTGGTGGCTCTTTCAAGTCCT |
| NC_045512.2_21mer_win1_29705 | 29705 | 29725 | 3342 | CCTGAACTTTCTCGGTGGTGT | 4324 | TGTGGTGGCTCTTTCAAGTCC |
| NC_045512.2_21mer_win1_29706 | 29706 | 29726 | 3343 | CTGAACTTTCTCGGTGGTGTA | 4325 | ATGTGGTGGCTCTTTCAAGTC |
| NC_045512.2_21mer_win1_29707 | 29707 | 29727 | 3344 | TGAACTTTCTCGGTGGTGTAA | 4326 | AATGTGGTGGCTCTTTCAAGT |
| NC_045512.2_21mer_win1_29708 | 29708 | 29728 | 3345 | GAACTTTCTCGGTGGTGTAAA | 4327 | AAATGTGGTGGCTCTTTCAAG |
| NC_045512.2_21mer_win1_29709 | 29709 | 29729 | 3346 | AACTTTCTCGGTGGTGTAAAA | 4328 | AAAATGTGGTGGCTCTTTCAA |
| NC_045512.2_21mer_win1_29710 | 29710 | 29730 | 3347 | ACTTTCTCGGTGGTGTAAAAG | 4329 | GAAAATGTGGTGGCTCTTTCA |
| NC_045512.2_21mer_win1_29711 | 29711 | 29731 | 3348 | CTTTCTCGGTGGTGTAAAAGT | 4330 | TGAAAATGTGGTGGCTCTTTC |
| NC_045512.2_21mer_win1_29733 | 29733 | 29753 | 3349 | GCTCCGGTGCGCCTCATGCTA | 4331 | ATCGTACTCCGCGTGGCCTCG |
| NC_045512.2_21mer_win1_29734 | 29734 | 29754 | 3350 | CTCCGGTGCGCCTCATGCTAG | 4332 | GATCGTACTCCGCGTGGCCTC |
| NC_045512.2_21mer_win1_29735 | 29735 | 29755 | 3351 | TCCGGTGCGCCTCATGCTAGC | 4333 | CGATCGTACTCCGCGTGGCCT |
| NC_045512.2_21mer_win1_29736 | 29736 | 29756 | 3352 | CCGGTGCGCCTCATGCTAGCT | 4334 | TCGATCGTACTCCGCGTGGCC |
| NC_045512.2_21mer_win1_29737 | 29737 | 29757 | 3353 | CGGTGCGCCTCATGCTAGCTC | 4335 | CTCGATCGTACTCCGCGTGGC |
| NC_045512.2_21mer_win1_29770 | 29770 | 29790 | 3354 | TTACGATCCCTCTCGACGGAT | 4336 | TAGGCAGCTCTCCCTAGCATT |
| NC_045512.2_21mer_win1_29771 | 29771 | 29791 | 3355 | TACGATCCCTCTCGACGGATA | 4337 | ATAGGCAGCTCTCCCTAGCAT |
| NC_045512.2_21mer_win1_29772 | 29772 | 29792 | 3356 | ACGATCCCTCTCGACGGATAT | 4338 | TATAGGCAGCTCTCCCTAGCA |
| NC_045512.2_21mer_win1_29773 | 29773 | 29793 | 3357 | CGATCCCTCTCGACGGATATA | 4339 | ATATAGGCAGCTCTCCCTAGC |
| NC_045512.2_21mer_win1_29774 | 29774 | 29794 | 3358 | GATCCCTCTCGACGGATATAC | 4340 | CATATAGGCAGCTCTCCCTAG |
| NC_045512.2_21mer_win1_29775 | 29775 | 29795 | 3359 | ATCCCTCTCGACGGATATACC | 4341 | CCATATAGGCAGCTCTCCCTA |
| NC_045512.2_21mer_win1_29776 | 29776 | 29796 | 3360 | TCCCTCTCGACGGATATACCT | 4342 | TCCATATAGGCAGCTCTCCCT |
| NC_045512.2_21mer_win1_29777 | 29777 | 29797 | 3361 | CCCTCTCGACGGATATACCTT | 4343 | TTCCATATAGGCAGCTCTCCC |
| NC_045512.2_21mer_win1_29778 | 29778 | 29798 | 3362 | CCTCTCGACGGATATACCTTC | 4344 | CTTCCATATAGGCAGCTCTCC |
| NC_045512.2_21mer_win1_29779 | 29779 | 29799 | 3363 | CTCTCGACGGATATACCTTCT | 4345 | TCTTCCATATAGGCAGCTCTC |
| NC_045512.2_21mer_win1_29780 | 29780 | 29800 | 3364 | TCTCGACGGATATACCTTCTC | 4346 | CTCTTCCATATAGGCAGCTCT |
| NC_045512.2_2lmer_win1_29781 | 29781 | 29801 | 3365 | CTCGACGGATATACCTTCTCG | 4347 | GCTCTTCCATATAGGCAGCTC |
| NC_045512.2_21mer_win1_29782 | 29782 | 29802 | 3366 | TCGACGGATATACCTTCTCGG | 4348 | GGCTCTTCCATATAGGCAGCT |
| NC_045512.2_21mer_win1_29783 | 29783 | 29803 | 3367 | CGACGGATATACCTTCTCGGG | 4349 | GGGCTCTTCCATATAGGCAGC |
| NC_045512.2_21mer_win1_29784 | 29784 | 29804 | 3368 | GACGGATATACCTTCTCGGGA | 4350 | AGGGCTCTTCCATATAGGCAG |
| NC_045512.2_21mer_win1_29785 | 29785 | 29805 | 3369 | ACGGATATACCTTCTCGGGAT | 4351 | TAGGGCTCTTCCATATAGGCA |
| NC_045512.2_21mer_win1_29786 | 29786 | 29806 | 3370 | CGGATATACCTTCTCGGGATT | 4352 | TTAGGGCTCTTCCATATAGGC |
| NC_045512.2_21mer_win1_29787 | 29787 | 29807 | 3371 | GGATATACCTTCTCGGGATTA | 4353 | ATTAGGGCTCTTCCATATAGG |
| NC_045512.2_21mer_win1_29788 | 29788 | 29808 | 3372 | GATATACCTTCTCGGGATTAC | 4354 | CATTAGGGCTCTTCCATATAG |
| NC_045512.2_21mer_win1_29789 | 29789 | 29809 | 3373 | ATATACCTTCTCGGGATTACA | 4355 | ACATTAGGGCTCTTCCATATA |
| NC_045512.2_21mer_win1_29790 | 29790 | 29810 | 3374 | TATACCTTCTCGGGATTACAC | 4356 | CACATTAGGGCTCTTCCATAT |
| NC_045512.2_2lmer_win1_29791 | 29791 | 29811 | 3375 | ATACCTTCTCGGGATTACACA | 4357 | ACACATTAGGGCTCTTCCATA |
| NC_045512.2_21mer_win1_29792 | 29792 | 29812 | 3376 | TACCTTCTCGGGATTACACAT | 4358 | TACACATTAGGGCTCTTCCAT |
| NC_045512.2_21mer_win1_29793 | 29793 | 29813 | 3377 | ACCTTCTCGGGATTACACATT | 4359 | TTACACATTAGGGCTCTTCCA |
| NC_045512.2_21mer_win1_29794 | 29794 | 29814 | 3378 | CCTTCTCGGGATTACACATTT | 4360 | TTTACACATTAGGGCTCTTCC |
| NC_045512.2_21mer_win1_29795 | 29795 | 29815 | 3379 | CTTCTCGGGATTACACATTTT | 4361 | TTTTACACATTAGGGCTCTTC |
| NC_045512.2_21mer_win1_29796 | 29796 | 29816 | 3380 | TTCTCGGGATTACACATTTTA | 4362 | ATTTTACACATTAGGGCTCTT |
| NC_045512.2_21mer_win1_29797 | 29797 | 29817 | 3381 | TCTCGGGATTACACATTTTAA | 4363 | AATTTTACACATTAGGGCTCT |
| NC_045512.2_21mer_win1_29798 | 29798 | 29818 | 3382 | CTCGGGATTACACATTTTAAT | 4364 | TAATTTTACACATTAGGGCTC |
| NC_045512.2_21mer_win1_29799 | 29799 | 29819 | 3383 | TCGGGATTACACATTTTAATT | 4365 | TTAATTTTACACATTAGGGCT |
| NC_045512.2_21mer_win1_29800 | 29800 | 29820 | 3384 | CGGGATTACACATTTTAATTA | 4366 | ATTAATTTTACACATTAGGGC |
| NC_045512.2_21mer_win1_29801 | 29801 | 29821 | 3385 | GGGATTACACATTTTAATTAA | 4367 | AATTAATTTTACACATTAGGG |
| NC_045512.2_21mer_win1_29802 | 29802 | 29822 | 3386 | GGATTACACATTTTAATTAAA | 4368 | AAATTAATTTTACACATTAGG |
| NC_045512.2_21mer_win1_29803 | 29803 | 29823 | 3387 | GATTACACATTTTAATTAAAA | 4369 | AAAATTAATTTTACACATTAG |
| NC_045512.2_21mer_win1_29804 | 29804 | 29824 | 3388 | ATTACACATTTTAATTAAAAT | 4370 | TAAAATTAATTTTACACATTA |
| NC_045512.2_21mer_win1_29805 | 29805 | 29825 | 3389 | TTACACATTTTAATTAAAATC | 4371 | CTAAAATTAATTTTACACATT |
| NC_045512.2_21mer_win1_29806 | 29806 | 29826 | 3390 | TACACATTTTAATTAAAATCA | 4372 | ACTAAAATTAATTTTACACAT |
| NC_045512.2_21mer_win1_29807 | 29807 | 29827 | 3391 | ACACATTTTAATTAAAATCAT | 4373 | TACTAAAATTAATTTTACACA |
| NC_045512.2_21mer_win1_29808 | 29808 | 29828 | 3392 | CACATTTTAATTAAAATCATC | 4374 | CTACTAAAATTAATTTTACAC |

TABLE 2
Genome Sequences for Coronaviruses

| SEQ | | |
|---|---|---|
| ID | Des- | |
| NO | cription | Sequence |
| 2407 | SARS-CoV- | attaaaggtttataccttcccaggtaacaaaccaaccaactttcgatctcttgtagatctgttctctaaacgaactttaaaatctgtgtggctgtcactcggctgcatgcttagtgc |
| | 2 genome | actcacgcagtataattaataactaattactgtcgttgacaggacacgagtaactcgtctatcttctgcaggctgcttacggtttcgtccgtgttgcagccgatcatcagcacat |
| | (Genbank | ctaggtttcgtccgggtgtgaccgaaaggtaagatggagagccttgtccctggtttcaacgagaaaacacacgtccaactcagtttgcctgttttacaggttcgcgacgtgct |
| | Accession | cgtacgtggctttggagactccgtggaggaggtatatcagaggcacgtcaacatcttaaagatggcacttgtggcttagtagaagttgaaaaaggcgttttgcctcaacttg |
| | No. | aacagccctatgtgttcatcaaacgttcggatgctcgaactgcacctcatggtcatgttatggttgagctggtagcagaactcgaaggcattcagtacggtcgtagtggtgag |
| | NC_ | acacttggtgtccttgtccctcatgtgggcgaaataccagtggcttaccgcaaggttcttcttcgtaagaacggtaataaaggagctggtggccatagttacggcgccgatct |
| | 045512.2) | aaagtcatttgacttaggcgacgagcttggcactgatccttatgaagattttcaagaaaactggaacactaaacatagcagtggtgttacccgtgaactcatgcgtgagctta |
| | | acggaggggcatacactcgctatgtcgataacaacttctgtggccctgatggctaccctcttgagtgcattaaagaccttctagcacgtgctggtaaagcttcatgcactttgt |
| | | ccgaacaactggactttattgacactaagaggggtgtatactgctgccgtgaacatgagcatgaaattgcttggtacacggaacgttctgaaaagagctatgaattgcagac |
| | | acatttgaaattaaattggcaaagaaatttgacaccttcaatggggaatgtccaaattttgtatttcccttaaattccataatcaagactattcaaccaagggttgaaaagaaaa |
| | | agcttgatggctttatgggtagaattcgatctgtctatccagttgcgtcaccaaatgaatgcaaccaaatgtgcctttcaactctcatgaagtgtgatcattgtggtgaaacttca |
| | | tggcagacgggcgattttgttaaagccacttgcgaattttgtggcactgagaatttgactaaagaaggtgccactacttgtggttacttaccccaaaatgctgttgttaaaattta |
| | | ttgtccagcatgtcacaattcagaagtaggacctgagcatagtcttgccgaataccataatgaatctggcttgaaaaccattcttcgtaagggtggtcgcactattgcctttgga |
| | | ggctgtgtgttctcttatgttggttgccataacaagtgtgcctattgggttccacgtgctagcgctaacataggttgtaaccatacaggtgttgttggagaaggttccgaaggtc |
| | | ttaatgacaaccttcttgaaatactccaaaaagagaaagtcaacatcaatattgttggtgactttaaacttaatgaagagatcgccattattttggcatctttttctgcttccacaag |
| | | tgatttgtggaaactgtgaaaggtttggattataaagcattcaaacaaattgttgaatcctgtggtaattttaaagttacaaaaggaaaagctaaaaaaggtgcctggaatattg |
| | | gtgaacagaaatcaatactgagtcctattatgcatttgcatcagaggctgctcgtgttgtacgatcaattttctcccgcactcttgaaactgctcaaaattctgtgcgtgttttaca |
| | | gaaggccgctataacaatactagatggaatttcacagtattcactgagactcattgatgctatgatgttcacatctgatttggctactaacaatctagttgtaatggcctacattac |
| | | aggtggtgttgttcagttgacttcgcagtggctaactaacatattggcactgtttatgaaaaactcaaacccgtccttgattggcttgaagagaagtttaaggaaggtgtagag |
| | | tttcttagagacggttgggaaattgttaaatttatctcaacctgtgcttgtgaaattgtcggtggacaaattgtcacctgtgcaaaggaaattaaggagagtgttcagacattcttt |
| | | aagcttgtaaataaatttttggctttgtgtgctgactctatcattattggtggagctaaacttaaagccttgaatttaggtgaaacatttgtcacgcactcaaagggattgtacaga |
| | | aagtgtgttaaatccagagaagaaactggcctactcatgcctctaaaagccccaaaagaaattatcttcttagagggagaaacacttcccacagaagtgttaacagaggaa |
| | | gttgtcttgaaaactggtgatttacaaccattagaacaacctactagtgaagctgttgaagctccattggttggtacaccagtttgtattaacgggcttatgttgctcgaaatcaa |
| | | agacacagaaaagtactgtgccatgcacctaatatgatggtaacaaacaataccttcacactcaaaggcggtgcaccaacaaaggttacttttggtgatgacactgtgata |
| | | gaagtgcaaggttacaagagtgtgaatatcacttttgaacttgatgaaaggattgataaagtacttaatgagaagtgctctgcctatacagttgaactcggtacagaagtaaat |
| | | gagttcgcctgtgttgtggcagatgctgtcataaaaactttgcaaccagtatctgaattacttacaccactgggcattgatttagatgagtggagtatggctacatactacttattt |
| | | gatgagtaggtgagtttaaattggcttcacatatgtattgttattctaccctccagatgaggatgaagaagaaggtgattgtgaagaagaagagtttgagccatcaactcaat |
| | | atgagtatggtactgaagatgattaccaaggtaaacctttggaatttggtgccacttctgctgacttcaacctgaagaagagcaagaagaagattggttagatgatgatagtc |
| | | aacaaactgttggtcaacaagacggcagtgaggacaatcagacaactactattcaaacaattgttgaggttcaacctcaattagagatggaacttacaccagttgttcagact |
| | | attgaagtgaatagttttagtggttatttaaaacttactgacaatgtatacattaaaaatgcagacattgtggaagaagctaaaaaggtaaaaccaacagtggttgttaatgcag |
| | | ccaatgtttaccttaaacatggaggaggtgttgcaggagccttaaataaggctactaacaatgccatgcaagttgaatctgatgattacatagctactaatggaccacttaaag |
| | | tgggtggtagttgtgttttaagcggacacaatcttgctaaacactgtcttcatgttgtcggcccaaatgttaacaaaggtgaagacattcaacttcttaagagtgcttatgaaaat |
| | | tttaatcagcacgaagttctacttgcaccattattatcagaggtatttttggtgctgaccctatacattattaagagtttgtgtagatactgttcgcacaaatgtctacttagctgtc |
| | | tttgataaaaatctctatgacaaacttgtttcaagattttggaaatgaagagtgaaaagcaagttgaacaaaagatcgctgagattcctaaagaggaagttaagccatttataa |
| | | ctgaaagtaaaccttcagttgaacagagaaaacaagatgataagaaaatcaaagcttgtgttgaagaagttacaacaactctggaagaaactaagttcctcacagaaaactt |
| | | gttactttatattgacattaatggcaatcttcatccagattctgccactcttgttagtgacattgacatcactttcttaaagaaagatgctccatatatagtgggtgatgttgttcaag |
| | | agggtgttttaactgctgtggttatacctactaaaaaggctggtggcactactgaaatgctagcgaaagctttgagaaaagtgccaacagacaattatataaccacttacccg |
| | | ggtcagggtttaaatggttacactgtagaggaggcaaagacagtgcttaaaaagtgtaaaagtgccttttacattctaccatctattatctctaatgagaagcaagaaattcttg |
| | | gaactgtttcttggaatttgcgagaaatgcttgcacatgcagaagaaacacgcaaattaatgcctgtagtgtggaaactaaagccatagtttcaactatacagcgtaaatata |
| | | agggtattaaaatacaagagggtgtggttgattatggtgctagattttacttttacaccagtaaaacaactgtagcgtcacttatcaacacacttaacgatctaaatgaaactctt |
| | | gttacaatgccacttggctatgtaacacatggcttaaatttggaagaagctgctcggtatatgagatctctcaaagtgccagctacagtttctgtttcttcacctgatgctgttaca |
| | | gcgtataatggttatcttacttcttcttctaaaacacctgaagaacattttattgaaaccatctcacttgctggttcctataaagattggtcctattctggacaatctacacaactagg |
| | | tatagaatttcttaagagaggtgataaaagtgtatattacactagtaatcctaccacattccacctagatggtgaagttatcacctttgacaatcttaagacacttattctttgaga |
| | | gaagtgaggactattaaggtgtttacaacagtagacaacattaacctccacacgcaagttgtggacatgtcaatgacatatggacaacagtttggtccaacttatttggatgg |
| | | agctgatgttactaaaataaaacctcataattcacatgaaggtaaaacattttatgttttacctaatgatgacactctacgtgttgaggcttttgagtactaccacacaactgatcct |
| | | agttttctgggtaggtacatgtcagcattaaatcacactaaaaagtggaaatacccacaagttaatggtttaacttctattaaatgggcagataacaactgttatcttgccactgc |
| | | attgttaacactccaacaaatagagttgaagtttaatccacctgctctacaagatgcttattacagagcaagggctggtgaagctgctaacttttgtgcacttatcttagcctact |
| | | gtaataagacagtaggtgagttaggtgatgttagagaaacaatgagttacttgtttcaacatgccaatttagattcttgcaaaagagtcttgaacgtggtgtgtaaaacttgtgg |
| | | acaacagcagacaacccttaagggtgtagaagctgttatgtacatgggcacactttcttatgaacaatttaagaaaggtgttcagataccttgtacgtgtggtaaacaagctac |
| | | aaaatatctagtacaacaggagtcaccttttgttatgatgtcagcaccacctgctcagtatgaacttaagcatggtacatttacttgtgctagtgagtacactggtaattaccagt |
| | | gtggtcactataaacatataacttctaaagaaactttgtattgcatagacggtgattacttacaaagtcctcagaatacaaaggtcctattacggatgttttctacaaagaaaac |
| | | agttacacaacaaccataaaaccagttacttataaattggatggtgttgtttgtacagaaattgaccctaagttggacaattattataagaaagacaattcttatttcacagagca |
| | | accaattgatcttgtaccaaaccaaccatatccaaacgcaagcttcgataattttaagtttgtatgtgataatatcaaatttgctgatgatttaaaccagttaactggttataagaaa |
| | | cctgcttcaagagagcttaaagttacatttttccctgacttaaatggtgatgtggtggctattgattataaacactacacaccctatttaagaaaggagctaaattgttacataaa |
| | | cctattgtttggcatgttaacaatgcaactaataaagccacgtataaaccaaatacctggtgtatacgttgtctttggagcacaaaaccagttgaaacatcaaattcgtttgatgt |
| | | actgaagtcagaggacgcgcagggaatggataatcttgcctgcgaagatctaaaaccagtactgaagaagtagtggaaaatcctaccatacagaaagacgttcttgagt |
| | | gtaatgtgaaaactaccgaagttgtaggagacattatacttaaaccagcaaataatagtttaaaaattacagaagaggttggccacacagatctaatggctgcttatgtagac |
| | | aattctagtcttactattaagaaacctaatgaattatctagagtattaggtttgaaaacccttgctactcatggtttagctgctgttaatagtgtcccttgggatactatagctaattat |
| | | gctaagccttttcttaacaaagttgttagtacaactactaacatagttacacggtgtttaaaccgtgtttgtactaattatatgccttatttattactttattgctacaattgtgtactttt |
| | | actagaagtacaaattctagaattaaagcatctatgccgactactatagcaaagaatactgttaagagtgtcggtaaattttgtctagaggcttcatttaattatttgaagtcacct |
| | | aatttttctaaactgataaatattataatttggtttttactattaagtgtttgcctaggttctttaatctactcaaccgctgctttaggtgttttaatgtctaatttaggcatgccttcttact |
| | | gtactggttacagagaaggctatttgaactctactaatgtcactattgcaacctactgtactggttctataccttgtagtgtttgtcttagtggtttagattattagacacctatcctt |
| | | ctttagaaactatacaaattaccatttcatcttttaaatgggatttaactgatttggcttagttgcagagtggtttttggcatatattatttcactaggtttttctatgtacttggattgg |
| | | ctgcaatcatgcaattgtttttcagctattttgcagtacattttattagtaattcttggcttatgtggttaataattaatcttgtacaaatggccccgatttcagctatggttagaatgta |
| | | catcttctttgcatcattttattatgtatggaaaagttatgtgcatgttgtagacggttgtaattcatcaacttgtatgatgtgttacaaacgtaatagagcaacaagagtcgaatgt |
| | | acaactattgttaatggtgttagaaggtccttttatgtctatgctaatggaggtaaaggcttttgcaaactacacaattggaattgtgttaattgtgatacattctgtgctggtagta |
| | | catttattagtgatgaagttgcgagagacttgtcactacagtttaaaagaccaataaatcctactgaccagtcttcttacatcgttgatagtgttacagtgaagaatggttccatcc |
| | | atctttactttgataaagctggtcaaaagacttatgaaagacattctctctctcattttgttaacttagacaacctgagagctaataacactaaaggttcattgcctattaatgttata |
| | | gtttttgatggtaaatcaaaatgtgaagaatcatctgcaaaatcagcgtctgtttactacagtcagcttatgtgtcaacctatactgttactagatcaggcattagtgtctgatgttg |
| | | gtgatagtgcggaagttgcagttaaaatgtttgatgcttacgttaatacgttttcatcaacttttaacgtaccaatggaaaaactcaaaacactagttgcaactgcagaagctga |
| | | acttgcaaagaatgtgtccttagacaatgtcttatctacttttatttcagcagctcggcaagggtttgttgattcagatgtagaaactaaagatgttgttgaatgtcttaaattgtca |
| | | catcaatctgacatagaagttactggcgatagttgtaataactatatgctcacctataacaaagttgaaaacatgacaccccgtgaccttggtgcttgtattgactgtagtgcgc |
| | | gtcatattaatgcgcaggtagcaaaaagtcacaacattgctttgatatggaacgttaaagatttcatgtcattgtctgaacaactacgaaaacaaatacgtagtgctgctaaaa |
| | | agaataacttaccttttaagttgacatgtgcaactactagacaagttgttaatgttgtaacaacaaagatagcacttaagggtggtaaaattgttaataattggttgaagcagtta |
| | | attaaagttacacttgtgttcctttttgttgctgctattttctatttaataacacctgttcatgtcatgtctaaacatactgacttttcaagtgaaatcataggatacaaggctattgatg |
| | | gtggtgtcactcgtgacatagcatctacagatacttgttttgctaacaaacatgctgattttgacacatggtttagccagcgtggtggtagttatactaatgacaaagcttgccca |
| | | ttgattgctgcagtcataacaagagaagtgggttttgtcgtgcctggtttgcctggcacgatattacgcacaactaatggtgactttttgcatttcttacctagagtttttagtgca |
| | | gttggtaacatctgttacacaccatcaaaacttatagagtacactgactttgcaacatcagcttgtgttttggctgctgaatgtacaatttttaaagatgcttctggtaagccagta |
| | | ccatattgttatgataccaatgtactagaaggttctgttgcttatgaaagtttacgccctgacacacgttatgtgctcatggatggctctattattcaatttcctaacacctaccttga |
| | | aggttctgttagagtggtaacaacttttgattctgagtactgtaggcacggcacttgtgaaagatcagaagctggtgtttgtgtatctactagtggtagatgggtacttaacaat |
| | | gattattacagatattaccaggagttttctgtggtgtagatgctgtaaatttacttactaatatgtttacaccactaattcaacctattggtgattggacatatcagcatctatagta |
| | | gctggtggtattgtagctatcgtagtaacatgccttgcctactattttatgaggtttagaagagcttttggtgaatacagtcatgtagttgcctttaatactttactattccttatgtcat |
| | | tcactgtactagtttaacaccagtttactcattcttacctggtgtttattctgttatttacttgtacttgacattttatcttactaatgatgtttcttttttagcacatattcagtggatggtt |
| | | atgttcacacctttagtacctttctggataacaattgcttatatcatttgtatttccacaaagcatttctattggttctttagtaattacctaaagagacgtgtagtattaatggtgtttcct |
| | | ttagtacttttgaagaagctgcgctgtgcacctttttgttaaataaagaaatgtatctaaagttgcgtagtgatgtgctattacctcttacgcaatataatagatacttagctctttata |
| | | ataagtacaagtattttagtggagcaatggatacaactagctacagagaagctgcttgttgtcatctcgcaaaggctctcaatgacttcagtaactcaggttctgatgttctttac |
| | | caaccaccacaaacctctatcacctcagctgttttgcagagtggttttagaaaaatggcattcccatctggtaaagttgagggttgtatggtacaagtaacttgtggtacaacta |
| | | cacttaacggtattggcttgatgacgtagtttactgtccaagacatgtgatctgcacctctgaagacatgcttaaccctaattatgaagatttactcattcgtaagtctaatcataa |
| | | tttcttggtacaggctggtaatgttcaactcagggttattggacattctatgcaaaattgtgtacttaagcttaaggttgatacagccaatcctaagacacctaagtataagtttgtt |
| | | cgcattcaaccaggacagactttttcagtgttagcttgttacaatggttcaccatctggtgtttaccaatgtgctatgaggcccaatttcactattaagggttcattccttaatggtt |
| | | catgtggtagtgttggttttaacatagattatgactgtgtctattttgttacatgcaccatatggaattaccaactggagttcatgctggcacagacttagaaggtaacttttatgg |
| | | accttttgttgacaggcaaacagcacaagcagctggtacggacacaactattacagttaatgttttagcttggttgtacgctgctgttataaatggagacaggtggtttctcaat |
| | | cgatttaccacaactcttaatgactttaaccttgtggctatgaagtacaattatgaacctctaacacaagaccatgttgacatactaggacctattctgctcaaactggaattgc |
| | | cgttttagatatgtgtgcttcattaaaagaattactgcaaaatggtatgaatggacgtaccatattgggtagtgattattagaagatgaatttacaccttttgatgttgttagacaat |
| | | gctcaggtgttactttccaaagtgcagtgaaaagaacaatcaagggtacacaccactggttgttactcacaattttgacttcacttttagttttagtccagagtactcaatggtctt |
| | | tgttatttttttgtatgaaaatgcctttttaccttttgctatgggtattattgctatgtctgatttgcaatgatgtttgtcaaacataagcatgcatttactgtttgtttttgttaccttctct |
| | | tgccactgtagcttattttaatatggtctatatgcctgctagttgggtgatgcgtattatgacatggttggatatggttgatactagtttgtaggttttaagctaaaagactgtgttat |
| | | gtatgcatcagctgtagtgttactaatccttatgacagcaagaactgtgtatgatgatggtgctaggagagtgtggacacttatgaatgtcttgacactcgtttataaagtttatta |
| | | tggtaatgattagatcaagccatttccatgtgggctcttataatctctgttacttctaactactcaggtgtagttacaactgtcatgtttttggccagaggtattgtttttatgtgtgtt |
| | | gagtattgccctattttcttcataactggtaatacacttcagtgtataatgctagtttattgtttcttaggctatttttgtacttgttactttggcctatttgtttactcaaccgctactttag |
| | | actgactcttggtgtttatgattacttagtttctacacaggagtttagatatatgaattcacagggactactcccacccaagaatagcatagatgccttcaaactcaacattaaatt |
| | | gttgggtgttggtggcaaaccttgtatcaaagtagccactgtacagtctaaaatgtcagatgtaaagtgcacatcagtagtcttactctcagttttgcaacaactcagagtagaa |
| | | tcatcatctaaattgtgggctcaatgtgtccagttacacaatgacattctcttagctaaagatactactgaagcctttgaaaaaatggtttcactactttctgttttgattccatgca |
| | | gggtgctgtagacataaacaagattgtgaagaaatgctggacaacagggcaaccttacaagctatagcctcagagtttagttccdtccatcatatgcagcttttgctactgc |
| | | tcaagaagcttatgagcaggctgttgctaatggtgattctgaagttgttcttaaaaagttgaagaagtattgaatgtggctaaatctgaatttgaccgtgatgcagccatgcaa |
| | | cgtaagttggaaaagatggctgatcaagctatgacccaaatgtataaacaggctagatctgaggacaagagggcaaaagttactagtgctatgcagacaatgatttcacta |
| | | tgcttagaaagttggataatgatgcactcaacaacattatcaacaatgcaagagatggttgtgttccdtgaacataatacctcttacaacagcagccaaactaatggttgtcat |
| | | accagactataacacatataaaaatacgtgtgatggtacaacatttacttatgcatcagcattgtgggaaatccaacaggttgtagatgcagatagtaaaattgttcaacttagt |
| | | gaaattagtatggacaattcacctaatttagcatggcctcttattgtaacagctttaagggccaattctgctgtcaaattacagaataatgagcttagtcctgttgcactacgaca |
| | | gatgtcttgtgctgccggtactacacaaactgcttgcactgatgacaatgcgttagcttactacaacacaacaaagggaggtaggtttgtacttgcactgttatccgatttacag |
| | | gatttgaaatgggctagattccctaagagtgatggaactggtactatctatacagaactggaaccaccttgtaggtttgttacagacacacctaaaggtcctaaagtgaagtat |
| | | ttatactttattaaaggattaaacaacctaaatagaggtatggtacttggtagtttagctgccacagtacgtctacaagctggtaatgcaacagaagtgcctgccaattcaactg |
| | | tattatattctgtgatttgctgtagatgctgctaaagcttacaaagattatctagctagtgggggacaaccaatcactaattgtgttaagatgttgtgtacacacactggtactg |
| | | gtcaggcaataacagttacaccggaagccaatatggatcaagaatcctttggtggtgcatcgtgttgtctgtactgccgttgccacatagatcatccaaatcctaaaggatttt |
| | | gtgacttaaaaggtaagtatgtacaaatacctacaacttgtgctaatgaccctgtgggttttacacttaaaaacacagtagtaccgtctgcggtatgtggaaaggttatggctg |
| | | tagttgtgatcaactccgcgaacccatgcttcagtcagctgatgcacaatcgtttttaaacgggtttgcggtgtaagtgcagcccgtcttacaccgtgcggcacaggcactag |
| | | tactgatgtcgtatacagggcttttgacatctacaatgataaagtagctggttttgctaaattcctaaaaactaattgttgtcgcttccaagaaaaggacgaagatgacaatttaat |
| | | tgattcttactttgtagttaagagacacactttctctaactaccaacatgaagaaacaatttataatttacttaaggattgtccagagttgctaaacatgacttattaagtttagaat |
| | | agacggtgacatggtaccacatatatcacgtcaacgtcttactaaatacacaatggcagacctcgtctatgattaaggcattttgatgaaggtaattgtgacacattaaaaga |
| | | aatacttgtcacatacaattgttgtgatgatgattatttcaataaaaaggactggtatgattttgtagaaaacccagatatattacgcgtatacgccaacttaggtgaacgtgtac |
| | | gccaagattgttaaaaacagtacaattctgtgatgccatgcgaaatgctggtattgttggtgtactgacattagataatcaagatctcaatggtaactggtatgatttcggtgatt |
| | | tcatacaaaccacgccaggtagtggagttcctgttgtagattcttattattcattgttaatgcctatattaaccttgaccagggctttaactgcagagtcacatgttgacactgactt |
| | | aacaaagccttacattaagtgggatttgttaaaatatgacttcacggaagagaggttaaaactattgaccgttattttaaatattgggatcagacataccacccaaattgtgtta |
| | | actgtttggatgacagatgcattctgcattgtgcaaactttaatgttttattctctacagtgttcccacctacaagttttggaccactagtgagaaaaatatttgttgatggtgttcca |
| | | tttgtagtttcaactggataccacttcagagagctaggtgttgtacataatcaggatgtaaacttacatagctctagacttagttttaaggaattacttgtgtatgctgctgaccctg |
| | | ctatgcacgctgcttctggtaatctattactagataaacgcactacgtgatttcagtagctgcacttactaacaatgttgatttcaaactgtcaaacccggtaattttaacaaag |
| | | acttctatgactttgctgtgtctaagggtttctttaaggaaggaagttctgttgaattaaaacacttcttctttgctcaggatggtaatgctgctatcagcgattatgactactatcgt |
| | | tataatctaccaacaatgtgtgatatcagacaactactatttgtagttgaagttgttgataagtactttgattgttacgatggtggctgtattaatgctaaccaagtcatcgtcaaca |
| | | acctagacaaatcagctggttttccatttaataaatggggtaaggctagactttattatgattcaatgagttatgaggatcaagatgcacttttcgcatatacaaaacgtaatgtca |
| | | tccctactataactcaaatgaatcttaagtatgccattagtgcaaagaatagagctcgcaccgtagctggtgtctctatctgtagtactatgaccaatagacagtttcatcaaaa |
| | | attattgaaatcaatagccgccactagaggagctactgtagtaattggaacaagcaaattctatggtggttggcacaacatgttaaaaactgtttatagtgatgtagaaaaccc |
| | | tcaccttatgggttgggattatcctaaatgtgatagagccatgcctaacatgcttagaattatggcctcacttgttcttgctcgcaaacatacaacgtgttgtagcttgtcacacc |
| | | gtttctatagattagctaatgagtgtgctcaagtattgagtgaaatggtcatgtgtggcggttcactatatgttaaaccaggtggaacctcatcaggagatgccacaactgctta |
| | | tgctaatagtgtttttaacatttgtcaagctgtcacggccaatgttaatgcacttttatctactgatggtaacaaaattgccgataagtatgtccgcaatttacaacacagactttat |
| | | gagtgtctctatagaaatagagatgttgacacagactttgtgaatgagttttacgcatatttgcgtaaacatttctcaatgatgatactctctgacgatgctgttgtgtgtttcaata |
| | | gcacttatgcatctcaaggtctagtggctagcataaagaactttaagtcagttctttattatcaaaacaatgtttttatgtctgaagcaaaatgttggactgagactgaccttacta |
| | | aaggacctcatgaattttgctctcaacatacaatgctagttaaacagggtgatgattatgtgtaccttccttacccagatccatcaagaatcctaggggccggctgttttgtagat |
| | | gatatcgtaaaaacagatggtacacttatgattgaacggttcgtgtattagctatagatgcttacccacttactaaacatcctaatcaggagtatgctgatgtattcatttgtactt |
| | | acaatacataagaaagctacatgatgagttaacaggacacatgttagacatgtattctgttatgcttactaatgataacacttcaaggtattgggaacctgagt-tttatgaggcta |
| | | tgtacacaccgcatacagtcttacaggctgttggggcttgtgttctttgcaattcacagacttcattaagatgtggtgcttgcatacgtagaccattcttatgttgtaaatgctgtta |
| | | cgaccatgtcatatcaacatcacataaattagtcttgtagttaatccgtatgtttgcaatgaccaggttgtgatgtcacagatgtgactcaactttacttaggaggtatgagctat |
| | | tattgtaaatcacataaaccacccattagttttccattgtgtgctaatggacaagtttttggtttatataaaaatacatgtgttggtagcgataatgttactgactttaatgcaattgca |
| | | acatgtgactggacaaatgctggtgattacattttagctaacacctgtactgaaagactcaagctttttgcagcagaaacgctcaaagctactgaggagacatttaaactgtctt |
| | | atggtattgctactgtacgtgaagtgctgtctgacagagaattacatctttcatgggaagttggtaaacctagaccaccacttaaccgaaattatgtctttactggttatcgtgta |
| | | actaaaaacagtaaagtacaaataggagagtacacctttgaaaaaggtgactatggtgatgctgttgtttaccgaggtacaacaacttacaaattaaatgttggtgattattttgt |
| | | gctgacatcacatacagtaatgccattaagtgcacctacactagtgccacaagagcactatgttagaattactggcttatacccaacactcaatatctcagatgagttttctagc |
| | | aatgttgcaaattatcaaaaggttggtatgcaaaagtattctacactccagggaccacctggtactggtaagagtcattttgctattggcctagctctctactacccttctgctcg |
| | | catagtgtatacagcttgactcatgccgctgttgatgcactatgtgagaaggcattaaaatatttgcctatagataaatgtagtagaattatacctgcacgtgctcgtgtagagt |
| | | gttttgataaattcaaagtgaattcaacattagaacagtatgtatttgtactgtaaatgcattgcctgagacgacagcagatatagttgtattgatgaaatttcaatggccacaa |
| | | attatgatttgagtgttgtcaatgccagattacgtgctaagcactatgtgtacattggcgaccctgctcaattacctgcaccacgcacattgctaactaagggcacactagaac |
| | | cagaatatttcaattcagtgtgtagacttatgaaaactataggtccagacatgttcctcggaacttgtcggcgttgtcctgctgaaattgttgacactgtgagtgctttggtttatg |
| | | ataataagcttaaagcacataaagacaaatcagctcaatgctttaaaatgttttataagggtgttatcacgcatgatgtttcatctgcaattaacaggccacaaataggcgtggt |
| | | aagagaattccttacacgtaaccctgcttggagaaaagagtctttatttcaccttataattcacagaatgctgtagcctcaaagattttgggactaccaactcaaactgttgattc |
| | | atcacagggctcagaatatgactatgtcatattcactcaaaccactgaaacagctcactcttgtaatgtaaacagatttaatgttgctattaccagagcaaaagtaggcatacttt |
| | | gcataatgtctgatagagacctttatgacaagttgcaatttacaagtcttgaaattccacgtaggaatgtggcaactttacaagctgaaaatgtaacaggactctttaaagattgt |
| | | agtaaggtaatcactgggttacatcctacacaggcacctacacacctcagtgttgacactaaattcaaaactgaaggtttatgtgttgacatacctggcatacctaaggacatg |
| | | acctatagaagactcatctctatgatgggttttaaaatgaattatcaagttaatggttaccctaacatgtttatcacccgcgaagaagctataagacatgtacgtgcatggattgg |
| | | cttcgatgtcgaggggtgtcatgctactagagaagctgttggtaccaatttacctttacagctaggtttttctacaggtgttaacctagttgctgtacctacaggttatgttgatac |
| | | acctaataatacagatttttccagagttagtgctaaaccaccgcctggagatcaatttaaacacctcataccacttatgtacaaaggacttccttggaatgtagtgcgtataaag |
| | | attgtacaaatgttaagtgacacacttaaaaatctactgacagagtcgtatttgtcttatgggcacatggctttgagttgacatctatgaagtattttgtgaaaataggacctgag |
| | | cgcacctgttgtctatgtgatagacgtgccacatgcttttccactgcttcagacacttatgcctgttggcatcattctattggatttgattacgtctataatccgtttatgattgatgtt |
| | | caacaatggggttttacaggtaacctacaaagcaaccatgatctgtattgtcaagtccatggtaatgcacatgtagctagttgtgatgcaatcatgactaggtgtctagctgtcc |
| | | acgagtgattgttaagcgtgttgactggactattgaatatcctataattggtgatgaactgaagattaatgcggcttgtagaaaggttcaacacatggttgttaaagctgcatta |
| | | ttagcagacaaattcccagttcttcacgacattggtaaccctaaagctattaagtgtgtacctcaagctgatgtagaatggaagttctatgatgcacagccttgtagtgacaaa |
| | | gcttataaaatagaagaattattctattcttatgccacacattctgacaaattcacagatggtgtatgcctattttggaattgcaatgtcgatagatatcctgctaattccattgtttgt |
| | | agatttgacactagagtgctatctaaccttaacttgcctggttgtgatggtggcagtttgtatgtaaataaacatgcattccacacaccagcttttgataaaagtgatttgttaattt |
| | | aaaacaattaccatttttctattactctgacagtccatgtgagtctcatggaaaacaagtagtgtcagatatagattatgtaccactaaagtagctacgtgtataacacgttgcaa |
| | | tttaggtggtgctgtctgtagacatcatgctaatgagtacagattgtatctcgatgcttataacatgatgatctcagctggctttagcttgtgggtttacaaacaatttgatacttata |
| | | acctaggaacacttttacaagacttcagagtttagaaaatgtggcttttaatgttgtaaataagggacactttgatggacaacagggtgaagtaccagtttctatcattaataac |
| | | actgtttacacaaaagttgatggtgttgatgtagaattgtttgaaaataaaacaacattacctgttaatgtagcatttgagctttgggctaagcgcaacattaaaccagtaccaga |
| | | ggtgaaaatactcaataatttgggtgtggacattgctgctaatactgtgatctgggactacaaaagagatgctccagcacatatatctactattggtgtttgttctatgactgaca |
| | | tagccaagaaaccaactgaaacgatttgtgcaccactcactgtcttttttgatggtagagttgatggtcaagtagacttatttagaaatgcccgtaatggtgttcttattacagaa |
| | | ggtagtgttaaaggtttacaaccatctgtaggtcccaaacaagctagtcttaatggagtcacattaattggagaagccgtaaaaacacagttcaattattataagaaagttgat |
| | | ggtgttgtccaacaattacctgaaacttactttactcagagtagaaatttacaagaatttaaacccaggagtcaaatggaaattgatttcttagaattagctatggatgaattcatt |
| | | gaacggtataaattagaaggctatgccttcgaacatatcgtttatggagattttagtcatagtcagttaggtggtttacatctactgattggactagctaaacgttttaaggaatca |
| | | catttgaattagaagattttattcctatggacagtacagttaaaaactatttcataacagatgcgcaaacaggttcatctaagtgtgtgtgttctgttattgatttattacttgatgatt |
| | | ttgttgaaataataaaatcccaagatttatctgtagtttctaaggttgtcaaagtgactattgactatacagaaatttcatttatgattggtgtaaagatggccatgtagaaacatttt |
| | | acccaaaattacaatctagtcaagcgtggcaaccgggtgttgctatgcctaatattacaaaatgcaaagaatgctattagaaaagtgtgaccttcaaaattatggtgatagtg |
| | | caacattacctaaaggcataatgatgaatgtcgcaaaatatactcaactgtgtcaatatttaaacacattaacattagctgtaccctataatatgagagttatacattttggtgctg |
| | | gttctgataaaggagttgcaccaggtacagctgttttaagacagtggttgcctacgggtacgctgcttgtcgattcagatcttaatgactttgtctctgatgcagattcaactttg |
| | | attggtgattgtgcaactgtacatacagctaataaatgggatctcattattagtgatatgtacgaccctaagactaaaaatgttacaaaagaaaatgactctaaagagggtttttt |
| | | cacttacatttgtgggtttatacaacaaaagctagctcttggaggttccgtggctataaagataacagaacattcttggaatgctgatctttataagctcatgggacacttcgcat |
| | | ggtggacagcctttgttactaatgtgaatgcgtcatcatctgaagcatttttaattggatgtaattatcttggcaaaccacgcgaacaaatagatggttatgtcatgcatgcaaat |
| | | tacatattttggaggaatacaaatccaattcagttgtcttcctattctttatttgacatgagtaaatttccccttaaattaaggggtactgctgttatgtattaaaagaaggtcaaatc |
| | | aatgatatgattttatctcttcttagtaaaggtagacttataattagagaaaacaacagagttgttatttctagtgatgttcttgttaacaactaaacgaacaatgtttgtttttcttgttt |
| | | tattgccactagtctctagtcagtgtgttaatcttacaaccagaactcaattaccccctgcatacactaattattcacacgtggtgtttattaccctgacaaagttttcagatcctca |
| | | gttttacattcaactcaggacttgttcttacctttatttccaatgttacttggttccatgctatacatgtctctgggaccaatggtactaagaggtttgataaccctgtcctaccattta |
| | | atgatggtgtttattttgcttccactgagaagtctaacataataagaggctggatttttggtactactttagattcgaagacccagtccctacttattgttaataacgctactaatgtt |
| | | gttattaaagtctgtgaatttcaattttgtaatgatccatttttgggtgtttattaccacaaaaacaacaaaagttggatggaaagtgagttcagagtttattctagtgcgaataattg |
| | | cacttttgaatatgtactcagccttttcttatggaccttgaaggaaaacagggtaatttcaaaaatcttagggaatttgtgtttaagaatattgatggttattttaaaatatattctaa |
| | | gcacacgcctattaatttagtgcgtgatctccctcagggtttttcggctttagaaccattggtagatttgccaataggtattaacatcactaggtttcaaactttacttgctttacata |
| | | gaagttatttgactcctggtgattcttcttcaggttggacagaggtgctgcagcttattatgtgggttatcttcaacctaggacttttctattaaaatataatgaaaatggaaccatt |
| | | acagatgctgtagactgtgcacttgaccctctctcagaaacaaagtgtacgttgaaatccttcactgtagaaaaaggaatctatcaaacttctaactttagagtccaaccaaca |
| | | gaatctattgttagatttcctaatattacaaacttgtgccatttggtgaagtttttaacgccaccagatttgcatctgtttatgcttggaacaggaagagaatcagcaactgtgttg |
| | | ctgattattctgtcctatataattccgcatcattttccacttttaagtgttatggagtgtctcctactaaattaaatgatactgattactaatgtctatgcagattcatttgtaattagag |
| | | gtgatgaagtcagacaaatcgctccagggcaaactggaaagattgctgattataattataaattaccagatgattttacaggctgcgttatagcttggaattctaacaatcttgat |
| | | tctaaggttggtggtaattataattacctgtatagattgtttaggaagtctaatctcaaaccttttgagagagatatttcaactgaaatctatcaggccggtagcacaccttgtaat |
| | | ggtgttgaaggttttaattgttactttcctttacaatcatatggtttccaacccactaatggtgttggttaccaaccatacagagtagtagtactttatttgaacttctacatgcacca |
| | | gcaactgtttgtggacctaaaaagtctactaatttggttaaaaacaaatgtgtcaatttcaacttcaatggtttaacaggcacaggtgttcttactgagtctaacaaaaagtttctg |
| | | cattccaacaatttggcagagacattgctgacactactgatgctgtccgtgatccacagacacttgagattcttgacattacaccatgttatttggtggtgtcagtgttataaca |
| | | ccaggaacaaatacttctaaccaggttgctgttattatcaggatgttaactgcacagaagtccctgttgctattcatgcagatcaacttactcctacttggcgtgtttattctaca |
| | | ggttctaatgtttttcaaacacgtgcaggctgtttaataggggctgaacatgtcaacaactcatatgagtgtgacatacccattggtgcaggtatatgcgctagttatcagactc |
| | | agactaattctcctcggcgggcacgtagtgtagctagtcaatccatcattgcctacactatgtcacttggtgcagaaaattcagttgcttactctaataactctattgccataccc |
| | | acaaattttactattagtgttaccacagaaattctaccagtgtctatgaccaagacatcagtagattgtacaatgtacatttgtggtgattcaactgaatgcagcaatcttttgttgc |
| | | aatatggcagtttttgtacacaattaaaccgtgattaactggaatagctgttgaacaagacaaaaacacccaagaagtttttgcacaagtcaaacaaatttacaaaacaccac |
| | | caattaaagattttggtggttttaatttttcacaaatattaccagatccatcaaaaccaagcaagaggtcatttattgaagatctacttttcaacaaagtgacacttgcagatgctg |
| | | gcttcatcaaacaatatggtgattgccttggtgatattgctgctagagacctcatttgtgcacaaaagtttaacggccttactgttttgccacctttgctcacagatgaaatgattg |
| | | ctcaatacacttctgcactgttagcgggtacaatcacttctggttggacctttggtgcaggtgctgcattacaaataccatttgctatgcaaatggcttataggtttaatggtattg |
| | | gagttacacagaatgttctctatgagaaccaaaaattgattgccaaccaatttaatagtgctattggcaaaattcaagactcactttcttccacagcaagtgcacttggaaaactt |
| | | caagatgtggtcaaccaaaatgcacaagctttaaacacgcttgttaaacaacttagctccaattttggtgcaatttcaagtgttttaaatgatatcctttcacgtcttgacaaagtt |
| | | gaggctgaagtgcaaattgataggttgatcacaggcagacttcaaagtttgcagacatatgtgactcaacaattaattagagctgcagaaatcagagcttctgctaatcttgct |
| | | gctactaaaatgtcagagtgtgtacttggacaatcaaaaagagttgatttttgtggaaagggctatcatcttatgtccttccctcagtcagcacctcatggtgtagtcttcttgcat |
| | | gtgacttatgtccctgcacaagaaaagaacttcacaactgctcctgccatttgtcatgatggaaaagcacactttcctcgtgaaggtgtctttgtttcaaatggcacacactggt |
| | | ttgtaacacaaaggaatttttatgaaccacaaatcattactacagacaacacatttgtgtaggtaactgtgatgttgtaataggaattgtcaacaacacagtttatgatcct-ttgc |
| | | aacctgaattagactcattcaaggaggagttagataaatattttaagaatcatacatcaccagatgttgatttaggtgacatctctggcattaatgcttcagttgtaaacattcaaa |
| | | aagaaattgaccgcctcaatgaggttgccaagaatttaaatgaatctctcatcgatctccaagaacttggaaagtatgagcagtatataaaatggccatggtacatttggctag |
| | | gttttatagaggcttgattgccatagtaatggtgacaattatgctttgctgtatgaccagttgctgtagttgtctcaagggctgttgttcttgtggatcctgctgcaaatttgatgaa |
| | | gacgactctgagccagtgctcaaaggagtcaaattacattacacataaacgaacttatggatttgtttatgagaatcttcacaattggaactgtaactttgaagcaaggtgaaat |
| | | caaggatgctactccttcagattttgttcgcgctactgcaacgataccgatacaagcctcactccctttcggatggcttattgttggcgttgcacttcttgctgtttttcagagcgc |
| | | ttccaaaatcataaccctcaaaaagagatggcaactagcactctccaagggtgttcactttgtttgcaacttgctgttgttgtttgtaacagtttactcacaccttttgctcgttgct |
| | | gctggccttgaagccccttttctctatctttatgctttagtctacttcttgcagagtataaactttgtaagaataataatgaggctttggctttgctggaaatgccgttccaaaaacc |
| | | cattactttatgatgccaactattttctttgctggcatactaattgttacgactattgtataccttacaatagtgtaacttcttcaattgtcattacttcaggtgatggcacaacaagtcc |
| | | tatttctgaacatgactaccagattggtggttatactgaaaaatgggaatctggagtaaaagactgtgttgtattacacagttacttcacttcagactattaccagctgtactcaac |
| | | tcaattgagtacagacactggtgttgaacatgttaccttcttcatctacaataaaattgttgatgagcctgaagaacatgtccaaattcacacaatcgacggttcatccggagtt |
| | | gttaatccagtaatggaaccaatttatgatgaaccgacgacgactactagcgtgcctttgtaagcacaagctgatgagtacgaacttatgtactcattcgtttcggaagagaca |
| | | ggtacgttaatagttaatagcgtacttattttcttgattcgtggtattcttgctagttacactagccatccttactgcgcttcgattgtgtgcgtactgctgcaatattgttaacgtga |
| | | gtcttgtaaaaccttattttacgtttactdcgtgttaaaaatctgaattcttctagagttcctgatcttctggtctaaacgaactaaatattatattagtttttctgtttggaactttaattt |
| | | tagccatggcagattccaacggtactattaccgttgaagagcttaaaaagctccttgaacaatggaacctagtaataggtttcctattccttacatggatttgtcttctacaatttg |
| | | cctatgccaacaggaataggtttttgtatataattaagttaattttcctaggctgttatggccagtaactttagcttgttttgtgcttgctgctgtttacagaataaattggatcaccg |
| | | gtggaattgctatcgcaatggcttgtcttgtaggcttgatgtggctcagctacttcattgcttctttcagactgtttgcgcgtacgcgttccatgtggtcattcaatccagaaacta |
| | | acattcttctcaacgtgccactccatggcactattctgaccagaccgcttctagaaagtgaactcgtaatcggagctgtgatccttcgtggacatcttcgtattgctggacacca |
| | | tctaggacgctgtgacatcaaggacctgcctaaagaaatcactgttgctacatcacgaacgctttcttattacaaattgggagcttcgcagcgtgtagcaggtgactcaggttt |
| | | tgctgcatacagtcgctacaggattggcaactataaattaaacacagaccattccagtagcagtgacaatattgattgcttgtacagtaagtgacaacagatgtttcatctcgt |
| | | tgactttcaggttactatagcagagatattactaattattatgaggacttttaaagtttccatttggaatcttgattacatcataaacctcataattaaaaatttatctaagtcactaact |
| | | gagaataaatattctcaattagatgaagagcaaccaatggagattgattaaacgaacatgaaaattattcttttcttggcactgataacactcgctacttgtgagattatcactac |
| | | caagagtgtgttagaggtacaacagtacttttaaaagaaccttgacttctggaacatacgagggcaattcaccatttcatcctctagctgataacaaatttgcactgacttgctt |
| | | tagcactcaatttgatttgcttgtcctgacggcgtaaaacacgtctatcagttacgtgccagatcagtttcacctaaactgttcatcagacaagaggaagttcaagaactttact |
| | | ctccaatttttcttattgttgcggcaatagtgtttataacactttgatcacactcaaaagaaagacagaatgattgaactttcattaattgacttctatttgtgattttagcctttctgc |
| | | tattccttgttttaattatgcttattatcttttggttctcacttgaactgcaagatcataatgaaacttgtcacgcctaaacgaacatgaaatttcttgttttcttaggaatcatcacaact |
| | | gtagctgcatttcaccaagaatgtagtttacagtcatgtactcaacatcaaccatatgtagttgatgacccgtgtcctattcacttctattctaaatggtatattagagtaggagct |
| | | agaaaatcagcacctttaattgaattgtgcgtggatgaggctggttctaaatcacccattcagtacatcgatatcggtaattatacagtttcctgtttaccttttacaattaattgcc |
| | | aggaacctaaattgggtagtcttgtagtgcgttgttcgttctatgaagactttttagagtatcatgacgttcgtgttgttttagatttcatctaaacgaacaaactaaaatgtctgata |
| | | atggaccccaaaatcagcgaaatgcaccccgcattacgtttggtggaccdcagattcaactggcagtaaccagaatggagaacgcagtggggcgcgatcaaaacaac |
| | | gtcggccccaaggtttacccaataatactgcgtcttggttcaccgctctcactcaacatggcaaggaagaccttaaattccctcgaggacaaggcgttccaattaacaccaat |
| | | agcagtccagatgaccaaattggctactaccgaagagctaccagacgaattcgtggtggtgacggtaaaatgaaagatctcagtccaagatggtatttctactacctagga |
| | | actgggccagaagctggacttccctatggtgctaacaaagacggcatcatatgggttgcaactgagggagccttgaatacaccaaaagatcacattggcacccgcaatcc |
| | | tgctaacaatgctgcaatcgtgctacaacttcctcaaggaacaacattgccaaaaggcttctacgcagaagggagcagaggcggcagtcaagcctcttctcgttcctcatc |
| | | acgtagtcgcaacagttcaagaaattcaactccaggcagcagtaggggaacttctcctgctagaatggctggcaatggcggtgatgctgctcttgattgctgctgcttgac |
| | | agattgaaccagcttgagagcaaaatgtaggtaaaggccaacaacaacaaggccaaactgtcactaagaaatctgctgctgaggcttctaagaagcctcggcaaaaac |
| | | gtactgccactaaagcatacaatgtaacacaagattcggcagacgtggtccagaacaaacccaaggaaattttggggaccaggaactaatcagacaaggaactgattac |
| | | aaacattggccgcaaattgcacaatttgcccccagcgcttcagcgttcttcggaatgtcgcgcattggcatggaagtcacaccttcgggaacgtggttgacctacacaggtg |
| | | ccatcaaattggatgacaaagatccaaatttcaaagatcaagtcattttgctgaataagcatattgacgcatacaaaacattcccaccaacagagcctaaaaaggacaaaaa |
| | | gaagaaggctgatgaaactcaagccttaccgcagagacagaagaaacagcaaactgtgactatcttcctgctgcagatttggatgatttctccaaacaattgcaacaatcc |
| | | atgagcagtgctgactcaactcaggcctaaactcatgcagaccacacaaggcagatgggctatataaacgttttcgcttttccgtttacgatatatagtctactcttgtgcagaa |
| | | tgaattctcgtaactacatagcacaagtagatgtagttaactttaatctcacatagcaatctttaatcagtgtgtaacattagggaggacttgaaagagccaccacattttcaccg |
| | | aggccacgcggagtacgatcgagtgtacagtgaacaatgctagggagagctgcctatatggaagagccctaatgtgtaaaattaattttagtagtgctatccccatgtgattt |
| | | taatagcttcttaggagaatgacaaaaaaaaaaaaaaaaaaaaaaaaaaaaaaaaa |
| 2408 | SARS-CoV- | atattaggtttttacctacccaggaaaagccaaccaacctcgatctcttgtagatctgttctctaaacgaactttaaaatctgtgtagctgtcgctcggctgcatgcctagtgcac |
| | 1 genome | ctacgcagtataaacaataataaattttactgtcgttgacaagaaacgagtaactcgtccctcttctgcagactgcttacggtttcgtccgtgttgcagtcgatcatcagcatacc |
| | (Genbank | taggtttcgtccgggtgtgaccgaaaggtaagatggagagccttgttcttggtgtcaacgagaaaacacacgtccaactcagtttgcctgtccttcaggttagagacgtgcta |
| | Accession | gtgcgtggcttcggggactctgtggaagaggccctatcggaggcacgtgaacacctcaaaaatggcacttgtggtctagtagagctggaaaaaggcgtactgccccagc |
| | No. | ttgaacagccctatgtgttcattaaacgttctgatgccttaagcaccaatcacggccacaaggtcgttgagctggttgcagaaatggacggcattcagtacggtcgtagcggt |
| | NC_ | ataacactgggagtactcgtgccacatgtgggcgaaaccccaattgcataccgcaatgttcttcttcgtaagaacggtaataagggagccggtggtcatagctatggcatc |
| | 004718.3) | gatctaaagtcttatgacttaggtgacgagcttggcactgatcccattgaagattatgaacaaaactggaacactaagcatggcagtggtgcactccgtgaactcactcgtga |
| | | gctcaatggaggtgcagtcactcgctatgtcgacaacaatttctgtggcccagatgggtaccctcttgattgcatcaaagattttctcgcacgcgcgggcaagtcaatgtgca |
| | | ctctttccgaacaacttgattacatcgagtcgaagagaggtgtctactgctgccgtgaccatgagcatgaaattgcctggttcactgagcgctctgataagagctacgagca |
| | | ccagacacccttcgaaattaagagtgccaagaaatttgacactttcaaaggggaatgcccaaagtttgtgtttcctcttaactcaaaagtcaaagtcattcaaccacgtgttga |
| | | aaagaaaaagactgagggtttcatggggcgtatacgctctgtgtaccctgttgcatctccacaggagtgtaacaatatgcacttgtctaccttgatgaaatgtaatcattgcga |
| | | tgaagtttcatggcagacgtgcgactttctgaaagccacttgtgaacattgtggcactgaaaatttagttattgaaggacctactacatgtgggtacctacctactaatgctgta |
| | | gtgaaaatgccatgtcctgcctgtcaagacccagagattggacctgagcatagtgttgcagattatcacaaccactcaaacattgaaactcgactccgcaagggaggtagg |
| | | actagatgttttggaggctgtgtgtttgcctatgttggctgctataataagcgtgcctactgggttcctcgtgctagtgctgatattggctcaggccatactggcattactggtga |
| | | caatgtggagaccttgaatgaggatctccttgagatactgagtcgtgaacgtgttaacattaacattgttggcgattttcatttgaatgaagaggttgccatcattttggcatcttt |
| | | ctctgcttctacaagtgcctttattgacactataaagagtcttgattacaagtattcaaaaccattgttgagtcctgcggtaactataaagttaccaagggaaagcccgtaaaag |
| | | gtgcttggaacattggacaacagagatcagttttaacaccactgtgtggttttccctcacaggctgctggtgttatcagatcaatttttgcgcgcacacttgatgcagcaaacca |
| | | ctcaattcctgatttgcaaagagcagctgtcaccatacttgatggtatttctgaacagtcattacgtcttgtcgacgccatggtttatacttcagacctgctcaccaacagtgtcat |
| | | tattatggcatatgtaactggtggtcttgtacaacagacttctcagtggttgtctaatcttttgggcactactgttgaaaaactcaggcctatctttgaatggattgaggcgaaact |
| | | tagtgcaggagttgaatttctcaaggatgcttgggagattctcaaatttctcattacaggtgtttttgacatcgtcaagggtcaaatacaggttgcttcagataacatcaaggatt |
| | | gtgtaaaatgcttcattgatgttgttaacaaggcactcgaaatgtgcattgatcaagtcactatcgctggcgcaaagttgcgatcactcaacttaggtgaagtcttcatcgctca |
| | | aagcaagggactttaccgtcagtgtatacgtggcaaggagcagctgcaactactcatgcctcttaaggcaccaaaagaagtaacctttcttgaaggtgattcacatgacaca |
| | | gtacttacctctgaggaggttgttctcaagaacggtgaactcgaagcactcgagacgcccgttgatagcttcacaaatggagctatcgttggcacaccagtagtgtaaatg |
| | | gcctcatgacttagagattaaggacaaagaacaatactgcgcattgtctcctggtttactggctacaaacaatgtattcgcttaaaagggggtgcaccaattaaaggtgtaa |
| | | cattggagaagatactgtttgggaagttcaaggttacaagaatgtgagaatcacatttgagcttgatgaacgtgttgacaaagtgcttaatgaaaagtgactgtctacactgt |
| | | tgaatccggtaccgaagttactgagtttgcatgtgttgtagcagaggctgttgtgaagactttacaaccagtttctgatctccttaccaacatgggtattgatcttgatgagtgga |
| | | gtgtagctacattctacttatttgatgatgctggtgaagaaaacttttcatcacgtatgtattgttccttttaccctccagatgaggaagaagaggacgatgcagagtgtgagga |
| | | agaagaaattgatgaaacctgtgaacatgagtacggtacagaggatgattatcaaggtaccactggaatttggtgcctcagctgaaacagttcgagttgaggaagaaga |
| | | agaggaagactggctggatgatactactgagcaatcagagattgagccagaaccagaacctacacctgaagaaccagttaatcagtttactggttatttaaaacttactgac |
| | | aatgttgccattaaatgtgttgacatcgttaaggaggcacaaagtgctaatcctatggtgattgtaaatgctgctaacatacacctgaaacatggtggtggtgtagcaggtgca |
| | | ctcaacaaggcaaccaatggtgccatgcaaaaggagagtgatgattacattaagctaaatggccctcttacagtaggagggtcttgtttgattctggacataatcttgctaag |
| | | aagtgtctgcatgttgttggacctaacctaaatgcaggtgaggacatccagcttcttaaggcagcatatgaaaatttcaattcacaggacatcttacttgcaccattgttgtcag |
| | | caggcatatttggtgctaaaccacttcagtattacaagtgtgcgtgcagacggttcgtacacaggtttatattgcagtcaatgacaaagctctttatgagcaggttgtcatgga |
| | | ttatcttgataacctgaagcctagagtggaagcacctaaacaagaggagccaccaaacacagaagattccaaaactgaggagaaatctgtcgtacagaagcctgtcgatg |
| | | tgaagccaaaaattaaggcctgcattgatgaggttaccacaacactggaagaaactaagtttcttaccaataagttactcttgtttgctgatatcaatggtaagattaccatgat |
| | | tctcagaacatgcttagaggtgaagatatgtctttccttgagaaggatgcaccttacatggtaggtgatgttatcactagtggtgatatcacttgtgttgtaataccctccaaaaa |
| | | ggctggtggcactactgagatgctctcaagagctttgaagaaagtgccagttgatgagtatataaccacgtaccctggacaaggatgtgctggttatacacttgaggaagct |
| | | aagactgctcttaagaaatgcaaatctgcattttatgtactaccttcagaagcacctaatgctaaggaagagattctaggaactgtatcctggaatttgagagaaatgcttgctc |
| | | atgctgaagagacaagaaaattaatgcctatatgcatggatgttagagccataatggcaaccatccaacgtaagtataaaggaattaaaattcaagagggcatcgttgactat |
| | | ggtgtccgattcttcttttatactagtaaagagcctgtagcttctattattacgaagctgaactctctaaatgagccgcttgtcacaatgccaattggttatgtgacacatggtttta |
| | | atcttgaagaggctgcgcgctgtatgcgttctcttaaagctcctgccgtagtgtcagtatcatcaccagatgctgttactacatataatggatacctcacttcgtcatcaaagac |
| | | atctgaggagcactttgtagaaacagtttattggctggctcttacagagattggtcctattcaggacagcgtacagagttaggtgttgaatttcttaagcgtggtgacaaaatt |
| | | gtgtaccacactctggagagccccgtcgagtttcatcttgacggtgaggttctttcacttgacaaactaaagagtctcttatccctgcgggaggttaagactataaaagtgttc |
| | | acaactgtggacaacactaatctccacacacagcttgtggatatgtctatgacatatggacagcagtttggtccaacatacttggatggtgctgatgttacaaaaattaaacct |
| | | catgtaaatcatgagggtaagactttattgtactacctagtgatgacacactacgtagtgaagattcgagtactaccatactcttgatgagagttttcttggtaggtacatgtct |
| | | gattaaaccacacaaagaaatggaaatttcctcaagttggtggtttaacttcaattaaatgggctgataacaattgttatttgtctagtgttttattagcacttcaacagcttgaagt |
| | | caaattcaatgcaccagcacttcaagaggcttattatagagcccgtgctggtgatgctgctaacttttgtgcactcatactcgcttacagtaataaaactgttggcgagcttggt |
| | | gatgtcagagaaactatgacccatcttctacagcatgctaatttggaatctgcaaagcgagttcttaatgtggtgtgtaaacattgtggtcagaaaactactaccttaacgggtg |
| | | tagaagctgtgatgtatatgggtactctatcttatgataatcttaagacaggtgtttccattccatgtgtgtgtggtcgtgatgctacacaatatctagtacaacaagagtcttctttt |
| | | gttatgatgtctgcaccacctgctgagtataaattacagcaaggtacattcttatgtgcgaatgagtacactggtaactatcagtgtggtcattacactcatataactgctaagga |
| | | gaccactatcgtattgacggagctcaccttacaaagatgtcagagtacaaaggaccagtgactgatgttttctacaaggaaacatcttacactacaaccatcaagcctgtgt |
| | | cgtataaactcgatggagttacttacacagagattgaaccaaaattggatgggtattataaaaaggataatgcttactatacagagcagcctatagaccttgtaccaactcaac |
| | | cattaccaaatgcgagttttgataatttcaaactcacatgttctaacacaaaatttgctgatgatttaaatcaaatgacaggcttcacaaagccagcttcacgagagctatctgtc |
| | | acattcttcccagacttgaatggcgatgtagtggctattgactatagacactattcagcgagtttcaagaaaggtgctaaattactgcataagccaattgtttggcacattaacc |
| | | aggctacaaccaagacaacgttcaaaccaaacacttggtgtttacgttgtctttggagtacaaagccagtagatacttcaaattcatttgaagttctggcagtagaagacacac |
| | | aaggaatggacaatcttgcttgtgaaagtcaacaacccacctctgaagaagtagtggaaaatcctaccatacagaaggaagtcatagagtgtgacgtgaaaactaccgaa |
| | | gttgtaggcaatgtcatacttaaaccatcagatgaaggtgttaaagtaacacaagagttaggtcatgaggatcttatggctgcttatgtggaaaacacaagcattaccattaag |
| | | aaacctaatgagctttcactagccttaggtttaaaaacaattgccactcatggtattgctgcaattaatagtgttccttggagtaaaattttggcttatgtcaaaccattcttaggac |
| | | aagcagcaattacaacatcaaattgcgctaagagattagcacaacgtgtgtttaacaattatatgccttatgtgtttacattattgttccaattgtgtacttttactaaaagtaccaat |
| | | tctagaattagagcttcactacctacaactattgctaaaaatagtgttaagagtgttgctaaattatgtttggatgccggcattaattatgtgaagtcacccaaattttctaaattgtt |
| | | cacaatcgctatgtggctattgttgttaagtatttgcttaggttactaatctgtgtaactgctgatttggtgtactcttatctaattttggtgctccttcttattgtaatggcgttagag |
| | | aattgtatcttaattcgtctaacgttactactatggatttctgtgaaggttatttccttgcagcatttgtttaagtggattagactcccttgattcttatccagctcttgaaaccattcag |
| | | gtgacgatttcatcgtacaagctagacttgacaattttaggtctggccgctgagtgggttttggcatatatgttgttcacaaaattatttatttattaggtctttcagctataatgca |
| | | ggtgttctttggctattttgctagtcatttcatcagcaattcttggctcatgtggtttatcattagtattgtacaaatggcacccgtttctgcaatggttaggatgtacatcttctttgctt |
| | | ctttctactacatatggaagagctatgttcatatcatggatggttgcacctcttcgacttgcatgatgtgctataagcgcaatcgtgccacacgcgttgagtgtacaactattgtt |
| | | aatggcatgaagagatctttctatgtctatgcaaatggaggccgtggcttctgcaagactcacaattggaattgtctcaattgtgacacattttgcactggtagtacattcattag |
| | | tgatgaagttgctcgtgatttgtcactccagtttaaaagaccaatcaaccctactgaccagtcatcgtatattgttgatagtgttgctgtgaaaaatggcgcgcttcacctctactt |
| | | tgacaaggctggtcaaaagacctatgagagacatccgctctcccattttgtcaatttagacaatttgagagctaacaacactaaaggttcactgcctattaatgtcatagtttttg |
| | | atggcaagtccaaatgcgacgagtctgcttctaagtctgcttctgtgtactacagtcagctgatgtgccaacctattctgttgcttgaccaagctcttgtatcagacgttggaga |
| | | tagtactgaagtttccgttaagatgtttgatgcttatgtcgacaccttttcagcaacttttagtgttcctatggaaaaacttaaggcacttgttgctacagctcacagcgagttagc |
| | | aaagggtgtagctttagatggtgtcctttctacattcgtgtcagctgcccgacaaggtgttgttgataccgatgttgacacaaaggatgttattgaatgtctcaaactttcacatc |
| | | actctgacttagaagtgacaggtgacagttgtaacaatttcatgctcacctataataaggttgaaaacatgacgcccagagatcttggcgcatgtattgactgtaatgcaagg |
| | | catatcaatgcccaagtagcaaaaagtcacaatgtttcactcatctggaatgtaaaagactacatgtctttatctgaacagctgcgtaaacaaattcgtagtgctgccaagaag |
| | | aacaacataccttttagactaacttgtgctacaactagacaggttgtcaatgtcataactactaaaatctcactcaagggtggtaagattgttagtacttgttttaaacttatgctta |
| | | aggccacattattgtgcgttcttgctgcattggtttgttatatcgttatgccagtacatacattgtcaatccatgatggttacacaaatgaaatcattggttacaaagccattcagga |
| | | tggtgtcactcgtgacatcatttctactgatgattgttttgcaaataaacatgctggttttgacgcatggtttagccagcgtggtggttcatacaaaaatgacaaaagctgccctg |
| | | tagtagctgctatcattacaagagagattggtttcatagtgcctggcttaccgggtactgtgctgagagcaatcaatggtgacttcttgcattttctacctcgtgtttttagtgctgt |
| | | tggcaacatttgctacacaccttccaaactcattgagtatagtgattttgctacctctgcttgcgttcttgctgctgagtgtacaatttttaaggatgctatgggcaaacctgtgcc |
| | | atattgttatgacactaatttgctagagggttctatttcttatagtgagcttcgtccagacactcgttatgtgcttatggatggttccatcatacagtttcctaacacttacctggagg |
| | | gttctgttagagtagtaacaacttttgatgctgagtactgtagacatggtacatgcgaaaggtcagaagtaggtatttgcctatctaccagtggtagatgggttcttaataatga |
| | | gcattacagagctctatcaggagttttctgtggtgttgatgcgatgaatctcatagctaacatctttactcctcttgtgcaacctgtgggtgattagatgtgtctgcttcagtagtg |
| | | gctggtggtattattgccatattggtgacttgtgctgcctactactttatgaaattcagacgtgtttttggtgagtacaaccatgttgttgctgctaatgcacttttgtttttgatgtcttt |
| | | cactatactagtaggtaccagcttacagctttctgccgggagtctactcagtatttacttgtacttgacattctatttcaccaatgatgtttcattcttggctcaccttcaatggttt |
| | | gccatgttttctcctattgtgcctttttggataacagcaatctatgtattctgtatttctctgaagcactgccattggttattaacaactatcttaggaaaagagtcatgtttaatgga |
| | | gttacatttagtaccttcgaggaggctgattgtgtacctttttgctcaacaaggaaatgtacctaaaattgcgtagcgagacactgttgccacttacacagtataacaggtatct |
| | | tgactatataacaagtacaagtatttcagtggagccttagatactaccagctatcgtgaagcagcttgctgccacttagcaaaggctctaaatgactttagcaactcaggtgct |
| | | gatgttactaccaaccaccacagacatcaatcacttctgctgttctgcagagtggttttaggaaaatggcattcccgtcaggcaaagttgaagggtgcatggtacaagtaac |
| | | ctgtggaactacaactcttaatggattgtggttggatgacacagtatactgtccaagacatgtcatttgcacagcagaagacatgcttaatcctaactatgaagatctgctcatt |
| | | cgcaaatccaaccatagctttcttgttcaggctggcaatgttcaacttcgtgttattggccattctatgcaaaattgtctgcttaggcttaaagttgatacttctaaccctaagacac |
| | | ccaagtataaatttgtccgtatccaacctggtcaaacattttcagttctagcatgctacaatggttcaccatctggtgtttatcagtgtgccatgagacctaatcataccattaaag |
| | | gttattccttaatggatcatgtggtagtgttggttttaacattgattatgattgcgtgtctttctgctatatgcatcatatggagcttccaacaggagtacacgctggtactgactta |
| | | gaaggtaaattctatggtccatttgttgacagacaaactgcacaggctgcaggtacagacacaaccataacattaaatgttttggcatggctgtatgctgctgttatcaatggt |
| | | gataggtggtttcttaatagattcaccactactttgaatgactttaaccttgtggcaatgaagtacaactatgaacctttgacacaagatcatgttgacatattgggacctctttctg |
| | | ctcaaacaggaattgccgtcttagatatgtgtgctgattgaaagagctgctgcagaatggtatgaatggtcgtactatccttggtagcactattttagaagatgagtttacacc |
| | | atttgatgttgttagacaatgactggtgttaccttccaaggtaagttcaagaaaattgttaagggcactcatcattggatgatttaactttcttgacatcactattgattcttgttca |
| | | aagtacacagtggtcactgtttttctttgtttacgagaatgattcttgccatttactcttggtattatggcaattgctgcatgtgctatgctgcttgttaagcataagcacgcattctt |
| | | gtgcttgtttctgttaccttctcttgcaacagttgcttactttaatatggtctacatgcctgctagctgggtgatgcgtatcatgacatggcttgaattggctgacactagcttgtctg |
| | | gttataggcttaaggattgtgttatgtatgcttcagctttagttttgcttattctcatgacagctcgcactgtttatgatgatgctgctagacgtgtttggacactgatgaatgtcatta |
| | | cacttgtttacaaagtctactatggtaatgattagatcaagctatttccatgtgggccttagttatttctgtaacctctaactattctggtgtcgttacgactatcatgtttttagctag |
| | | agctatagtgtttgtgtgtgttgagtattacccattgttatttattactggcaacaccttacagtgtatcatgcttgtttattgtttcttaggctattgttgctgctgctactttggccttttc |
| | | tgtttactcaaccgttacttcaggcttactcttggtgtttatgactacttggtactacacaagaatttaggtatatgaactcccaggggcttttgcctcctaagagtagtattgatg |
| | | ctttcaagcttaacattaagttgttgggtattggaggtaaaccatgtatcaaggttgctactgtacagtctaaaatgtctgacgtaaagtgcacatctgtggtactgctctcggttc |
| | | ttcaacaacttagagtagagtcatcttctaaattgtgggcacaatgtgtacaactccacaatgatattcttcttgcaaaagacacaactgaagctttcgagaagatggtttctcttt |
| | | tgtctgttttgctatccatgcagggtgctgtagacattaataggttgtgcgaggaaatgctcgataaccgtgctactcttcaggctattgcttcagaatttagttattaccatcata |
| | | tgccgcttatgccactgcccaggaggcctatgagcaggctgtagctaatggtgattctgaagtcgttctcaaaaagttaaagaaatctttgaatgtggctaaatctgagtttga |
| | | ccgtgatgctgccatgcaacgcaagttggaaaagatggcagatcaggctatgacccaaatgtacaaacaggcaagatctgaggacaagagggcaaaagtaactagtgc |
| | | tatgcaaacaatgctcttcactatgcttaggaagcttgataatgatgcacttaacaacattatcaacaatgcgcgtgatggttgtgttccactcaacatcataccattgactacag |
| | | cagccaaactcatggttgttgtccctgattatggtacctacaagaacacttgtgatggtaacacctttacatatgcatctgcactagggaaatccagcaagttgttgatgcgga |
| | | tagcaagattgttcaacttagtgaaattaacatggacaattcaccaaatttggcttggcctcttattgttacagctctaagagccaactcagctgttaaactacagaataatgaac |
| | | tgagtccagtagcactacgacagatgtcctgtgcggctggtaccacacaaacagcttgtactgatgacaatgcacttgcctactataacaattcgaagggaggtaggtttgt |
| | | gctggcattactatcagaccaccaagatctcaaatgggctagattccctaagagtgatggtacaggtacaatttacacagaactggaaccaccttgtaggtttgttacagaca |
| | | caccaaaagggcctaaagtgaaatacttgtacttcatcaaaggcttaaacaacctaaatagaggtatggtgctgggcagtttagctgctacagtacgtcttcaggctggaaat |
| | | gctacagaagtacctgccaattcaactgtgattccttctgtgatttgcagtagaccctgctaaagcatataaggattacctagcaagtggaggacaaccaatcaccaactgt |
| | | gtgaagatgttgtgtacacacactggtacaggacaggcaattactgtaacaccagaagctaacatggaccaagagtcctttggtggtgcttcatgttgtagtattgtagatgc |
| | | cacattgaccatccaaatcctaaaggattctgtgacttgaaaggtaagtacgtccaaatacctaccacttgtgctaatgacccagtgggttttacacttagaaacacagtagta |
| | | ccgtctgcggaatgtggaaaggttatggctgtagttgtgaccaactccgcgaacccttgatgcagtctgcggatgcatcaacgtttttaaacgggtttgcggtgtaagtgcag |
| | | cccgtcttacaccgtgcggcacaggcactagtactgatgtcgtctacagggcttttgatatttacaacgaaaaagttgctggttttgcaaagttcctaaaaactaattgctgtcg |
| | | cttccaggagaaggatgaggaaggcaatttattagactcttactttgtagttaagaggcatactatgtctaactaccaacatgaagagactatttataacttggttaaagattgtc |
| | | cagcggttgctgtccatgactttttcaagtttagagtagatggtgacatggtaccacatatatcacgtcagcgtctaactaaatacacaatggctgatttagtctatgctctacgt |
| | | cattttgatgagggtaattgtgatacattaaaagaaatactcgtcacatacaattgctgtgatgatgattatttcaataagaaggattggtatgacttcgtagagaatcctgacatc |
| | | ttacgcgtatatgctaacttaggtgagcgtgtacgccaatcattattaaagactgtacaattctgcgatgctatgcgtgatgcaggcattgtaggcgtactgacattagataatc |
| | | aggatcttaatgggaactggtacgatttcggtgatttcgtacaagtagcaccaggctgcggagttcctattgtggattcatattactcattgctgatgcccatcctcactttgact |
| | | agggcattggctgctgagtcccatatggatgctgatctcgcaaaaccacttattaagtgggatttgctgaaatatgattttacggaagagagactttgtctcttcgaccgttattt |
| | | taaatattgggaccagacataccatcccaattgtattaactgtttggatgataggtgtatccttcattgtgcaaactttaatgtgttattttctactgtgtttccacctacaagttttgg |
| | | accactagtaagaaaaatatttgtagatggtgttccttttgttgtttcaactggataccattttcgtgagttaggagtcgtacataatcaggatgtaaacttacatagctcgcgtctc |
| | | agtttcaaggaacttttagtgtatgctgctgatccagctatgcatgcagcttctggcaatttattgctagataaacgcactacatgatttcagtagctgcactaacaaacaatgtt |
| | | gcttttcaaactgtcaaacccggtaattttaataaagacttttatgactttgctgtgtctaaaggtttctttaaggaaggaagttctgttgaactaaaacacttcttctttgctcaggat |
| | | ggcaacgctgctatcagtgattatgactattatcgttataatctgccaacaatgtgtgatatcagacaactcctattcgtagttgaagttgttgataaatactttgattgttacgatg |
| | | gtggctgtattaatgccaaccaagtaatcgttaacaatctggataaatcagctggtttcccatttaataaatggggtaaggctagactttattatgactcaatgagttatgaggat |
| | | caagatgcacttttcgcgtatactaagcgtaatgtcatccctactataactcaaatgaatcttaagtatgccattagtgcaaagaatagagctcgcaccgtagaggtgtactat |
| | | ctgtagtactatgacaaatagacagtttcatcagaaattattgaagtcaatagccgccactagaggagctactgtggtaattggaacaagcaagttttacggtggctggcata |
| | | atatgttaaaaactgtttacagtgatgtagaaactccacaccttatgggttgggattatccaaaatgtgacagagccatgcctaacatgcttaggataatggcctctcttgttctt |
| | | gctcgcaaacataacacttgctgtaacttatcacaccgtttctacaggttagctaacgagtgtgcgcaagtattaagtgagatggtcatgtgtggcggctcactatatgttaaac |
| | | caggtggaacatcatccggtgatgctacaactgcttatgctaatagtgtctttaacatttgtcaagctgttacagccaatgtaaatgcacttattcaactgatggtaataagata |
| | | gctgacaagtatgtccgcaatctacaacacaggctctatgagtgtactatagaaatagggatgttgatcatgaattcgtggatgagttttacgcttacctgcgtaaacatttctc |
| | | catgatgattattctgatgatgccgttgtgtgctataacagtaactatgcggctcaaggtttagtagctagcattaagaactttaaggcagttattattatcaaaataatgtgttc |
| | | atgtctgaggcaaaatgttggactgagactgaccttactaaaggacctcacgaattttgctcacagcatacaatgctagttaaacaaggagatgattacgtgtacctgccttac |
| | | ccagatccatcaagaatattaggcgcaggctgttttgtcgatgatattgtcaaaacagatggtacacttatgattgaaaggttcgtgtcactggctattgatgcttacccacttac |
| | | aaaacatcctaatcaggagtatgctgatgtctttcacttgtatttacaatacattagaaagttacatgatgagcttactggccacatgttggacatgtattccgtaatgctaactaat |
| | | gataacacctcacggtactgggaacctgagttttatgaggctatgtacacaccacatacagtcttgcaggctgtaggtgcttgtgtattgtgcaattcacagacttcacttcgtt |
| | | gcggtgcctgtattaggagaccattcctatgttgcaagtgctgctatgaccatgtcatttcaacatcacacaaattagtgttgtctgttaatccctatgtttgcaatgccccaggtt |
| | | gtgatgtcactgatgtgacacaactgtatctaggaggtatgagctattattgcaagtcacataagcctcccattagttttccattatgtgctaatggtcaggtttttggtttatacaa |
| | | aaacacatgtgtaggcagtgacaatgtcactgacttcaatgcgatagcaacatgtgattggactaatgctggcgattacatacttgccaacacttgtactgagagactcaagc |
| | | ttttcgcagcagaaacgctcaaagccactgaggaaacatttaagctgtcatatggtattgccactgtacgcgaagtactctctgacagagaattgcatctttcatgggaggttg |
| | | gaaaacctagaccaccattgaacagaaactatgtattactggttaccgtgtaactaaaaatagtaaagtacagattggagagtacacctttgaaaaaggtgactatggtgat |
| | | gctgttgtgtacagaggtactacgacatacaagttgaatgttggtgattactttgtgttgacatctcacactgtaatgccacttagtgcacctactctagtgccacaagagcact |
| | | atgtgagaattactggcttgtacccaacactcaacatctcagatgagttttctagcaatgttgcaaattatcaaaaggtcggcatgcaaaagtactctacactccaaggaccac |
| | | ctggtactggtaagagtcattttgccatcggacttgactctattacccatctgctcgcatagtgtatacggcatgctctcatgcagctgttgatgccctatgtgaaaaggcatta |
| | | aaatatttgcccatagataaatgtagtagaatcatacctgcgcgtgcgcgcgtagagtgttttgataaattcaaagtgaattcaacactagaacagtatgttttagcactgtaaa |
| | | tgcattgccagaaacaactgctgacattgtagtctttgatgaaatctctatggctactaattatgacttgagtgttgtcaatgctagacttcgtgcaaaacactacgtctatattgg |
| | | cgatcctgctcaattaccagccccccgcacattgctgactaaaggcacactagaaccagaatattttaattcagtgtgcagacttatgaaaacaataggtccagacatgttcct |
| | | tggaacttgtcgccgttgtcctgctgaaattgttgacactgtgagtgattagtttatgacaataagctaaaagcacacaaggataagtcagctcaatgcttcaaaatgttctaca |
| | | aaggtgttattacacatgatgtttcatctgcaatcaacagacctcaaataggcgttgtaagagaatttcttacacgcaatcctgcttggagaaaagctgtttttatctcaccttata |
| | | attcacagaacgctgtagcttcaaaaatcttaggattgcctacgcagactgttgattcatcacagggttctgaatatgactatgtcatattcacacaaactactgaaacagcaca |
| | | ctcttgtaatgtcaaccgcttcaatgtggctatcacaagggcaaaaattggcattttgtgcataatgtctgatagagatctttatgacaaactgcaatttacaagtctagaaatac |
| | | cacgtcgcaatgtggctacattacaagcagaaaatgtaactggactttttaaggactgtagtaagatcattactggtcttcatcctacacaggcacctacacacctcagcgttg |
| | | atataaagttcaagactgaaggattatgtgttgacataccaggcataccaaaggacatgacctaccgtagactcatctctatgatgggtttcaaaatgaattaccaagtcaatg |
| | | gttaccctaatatgtttatcacccgcgaagaagctattcgtcacgttcgtgcgtggattggctttgatgtagagggctgtcatgcaactagagatgctgtgggtactaacctac |
| | | ctctccagctaggattttctacaggtgttaacttagtagctgtaccgactggttatgttgacactgaaaataacacagaattcaccagagttaatgcaaaacctccaccaggtg |
| | | accagtttaaacatcttataccactcatgtataaaggcttgccaggaatgtagtgcgtattaagatagtacaaatgctcagtgatacactgaaaggattgtcagacagagtcg |
| | | tgttcgtcctttgggcgcatggctttgagcttacatcaatgaagtactttgtcaagattggacctgaaagaacgtgttgtctgtgtgacaaacgtgcaacttgatttctacttcat |
| | | cagatacttatgcctgctggaatcattctgtgggttttgactatgtctataacccatttatgattgatgttcagcagtggggctttacgggtaaccttcagagtaaccatgaccaa |
| | | cattgccaggtacatggaaatgcacatgtggctagttgtgatgctatcatgactagatgtttagcagtccatgagtgctttgttaagcgcgttgattggtctgttgaataccctatt |
| | | ataggagatgaactgagggttaattctgcttgcagaaaagtacaacacatggttgtgaagtctgcattgcttgctgataagtttccagttcttcatgacattggaaatccaaagg |
| | | ctatcaagtgtgtgcctcaggctgaagtagaatggaagttctacgatgctcagccatgtagtgacaaagcttacaaaatagaggaactcttctattcttatgctacacatcacg |
| | | ataaattcactgatggtgtttgtttgttttggaattgtaacgttgatcgttacccagccaatgcaattgtgtgtaggtttgacacaagagtcttgtcaaacttgaacttaccaggctg |
| | | tgatggtggtagtttgtatgtgaataagcatgcattccacactccagctttcgataaaagtgcatttactaatttaaagcaattgcctttatttactattctgatagtccttgtgagtc |
| | | tcatggcaaacaagtagtgtcggatattgattatgttccactcaaatctgctacgtgtattacacgatgcaatttaggtggtgctgtttgcagacaccatgcaaatgagtaccga |
| | | cagtacttggatgcatataatatgatgatttctgctggatttagcctatggatttacaaacaatttgatacttataacctgtggaatacatttaccaggttacagagtttagaaaatg |
| | | tggcttataatgttgttaataaaggacactttgatggacacgccggcgaagcacctgtttccatcattaataatgctgtttacacaaaggtagatggtattgatgtggagatcttt |
| | | gaaaataagacaacacttcctgttaatgttgcatttgagctttgggctaagcgtaacattaaaccagtgccagagattaagatactcaataatttgggtgttgatatcgctgctaa |
| | | tactgtaatctgggactacaaaagagaagccccagcacatgtatctacaataggtgtctgcacaatgactgacattgccaagaaacctactgagagtgcttgttcttcacttac |
| | | tgtcttgtttgatggtagagtggaaggacaggtagacctttttagaaacgcccgtaatggtgttttaataacagaaggttcagtcaaaggtctaacaccttcaaagggaccag |
| | | cacaagctagcgtcaatggagtcacattaattggagaatcagtaaaaacacagtttaactactttaagaaagtagacggcattattcaacagttgcctgaaacctactttactc |
| | | agagcagagacttagaggattttaagcccagatcacaaatggaaactgactttctcgagctcgctatggatgaattcatacagcgatataagctcgagggctatgccttcga |
| | | acacatcgtttatggagatttcagtcatggacaacttggcggtcttcatttaatgataggcttagccaagcgctcacaagattcaccacttaaattagaggattttatccctatgg |
| | | acagcacagtgaaaaattacttcataacagatgcgcaaacaggttcatcaaaatgtgtgtgttctgtgattgatcttttacttgatgactttgtcgagataataaagtcacaagatt |
| | | tgtcagtgatttcaaaagtggtcaaggttacaattgactatgctgaaatttcattcatgattggtgtaaggatggacatgttgaaaccttctacccaaaactacaagcaagtcaa |
| | | gcgtggcaaccaggtgttgcgatgcctaacttgtacaagatgcaaagaatgcttcttgaaaagtgtgaccttcagaattatggtgaaaatgctgttataccaaaaggaataat |
| | | gatgaatgtcgcaaagtatactcaactgtgtcaatacttaaatacacttactttagctgtaccctacaacatgagagttattcactttggtgctggctctgataaaggagttgcac |
| | | caggtacagagtgctcagacaatggttgccaactggcacactacttgtcgattcagatcttaatgacttcgtctccgacgcagattctactttaattggagactgtgcaacagt |
| | | acatacggctaataaatgggaccttattattagcgatatgtatgaccctaggaccaaacatgtgacaaaagagaatgactctaaagaagggtttttcacttatctgtgtggattt |
| | | ataaagcaaaaactagccagggtggttctatagctgtaaagataacagagcattcttggaatgctgacctttacaagcttatgggccatttctcatggtggacagcttttgtta |
| | | caaatgtaaatgcatcatcatcggaagcatttttaattggggctaactatcttggcaagccgaaggaacaaattgatggctataccatgcatgctaactacattttctggagga |
| | | acacaaatcctatccagttgtcttcctattcactctttgacatgagcaaatttcctcttaaattaagaggaactgctgtaatgtctcttaaggagaatcaaatcaatgatatgatttat |
| | | tctcttctggaaaaaggtaggcttatcattagagaaaacaacagagttgtggtttcaagtgatattcttgttaacaactaaacgaacatgtttattttcttattatttcttactctcact |
| | | agtggtagtgaccttgaccggtgcaccacttttgatgatgttcaagctcctaattacactcaacatacttcatctatgaggggggtttactatcctgatgaaatttttagatcagac |
| | | actctttatttaactcaggatttatttcttccattttattctaatgttacagggtttcatactattaatcatacgtttggcaaccctgtcataccttttaaggatggtatttattttgctgcca |
| | | cagagaaatcaaatgttgtccgtggttgggtttttggttctaccatgaacaacaagtcacagtcggtgattattattaacaattctactaatgttgttatacgagcatgtaactttga |
| | | attgtgtgacaaccctttctttgctgtttctaaacccatgggtacacagacacatactatgatattcgataatgcatttaattgcactttcgagtacatatctgatgccttttcgcttga |
| | | tgtttcagaaaagtcaggtaattttaaacacttacgagagtttgtgtttaaaaataaagatgggtttctctatgtttataagggctatcaacctatagatgtagttcgtgatctacctt |
| | | ctggttttaacactttgaaacctatttttaagttgcctcttggtattaacattacaaattttagagccattcttacagccttttcacctgctcaagacatttggggcacgtcagctgca |
| | | gcctatt-ttgttggctatttaaagccaactacatttatgctcaagtatgatgaaaatggtacaatcacagatgctgttgattgttctcaaaatccacttgctgaactcaaatgctctg |
| | | ttaagagctttgagattgacaaaggaatttaccagacctctaatttcagggttgttccctcaggagatgttgtgagattccctaatattacaaacttgtgtccttttggagaggtttt |
| | | taatgctactaaattcccttctgtctatgcatgggagagaaaaaaaatttctaattgtgttgctgattactctgtgctctacaactcaacatttttttcaacctttaagtgctatggcgt |
| | | ttctgccactaagttgaatgatctttgcttctccaatgtctatgcagattcttttgtagtcaagggagatgatgtaagacaaatagcgccaggacaaactggtgttattgctgatta |
| | | taattataaattgccagatgatttcatgggttgtgtccttgcttggaatactaggaacattgatgctacttcaactggtaattataattataaatataggtatcttagacatggcaag |
| | | cttaggccattgagagagacatatctaatgtgcctttctcccctgatggcaaaccttgcaccccacctgctcttaattgttattggccattaaatgattatggtttttacaccacta |
| | | ctggcattggctaccaaccttacagagttgtagtactttatttgaacttttaaatgcaccggccacggtttgtggaccaaaattatccactgaccttattaagaaccagtgtgtca |
| | | attttaattttaatggactcactggtactggtgtgttaactccttcttcaaagagatttcaaccatttcaacaatttggccgtgatgtttctgatttcactgattccgttcgagatccta |
| | | aaacatctgaaatattagacatttcaccttgcgcttttgggggtgtaagtgtaattacacctggaacaaatgcttcatctgaagttgctgttctatatcaagatgttaactgcactg |
| | | atgtttctacagcaattcatgcagatcaactcacaccagcttggcgcatatattctactggaaacaatgtattccagactcaagcaggctgtcttataggagctgagcatgtcg |
| | | acacttcttatgagtgcgacattcctattggagaggcatttgtgctagttaccatacagtttattattacgtagtactagccaaaaatctattgtggcttatactatgtattaggtg |
| | | ctgatagttcaattgcttactctaataacaccattgctatacctactaacttttcaattagcattactacagaagtaatgcctgtttctatggctaaaacctccgtagattgtaatatgt |
| | | acatctgcggagattctactgaatgtgctaatttgcttctccaatatggtagcttttgcacacaactaaatcgtgcactctcaggtattgctgctgaacaggatcgcaacacacg |
| | | tgaagtgttcgctcaagtcaaacaaatgtacaaaaccccaactttgaaatattttggtggttttaatttttcacaaatattacctgaccctctaaagccaactaagaggtcttttatt |
| | | gaggacttgctctttaataaggtgacactcgctgatgctggcttcatgaagcaatatggcgaatgcctaggtgatattaatgctagagatctcatttgtgcgcagaagttcaat |
| | | ggacttacagtgttgccacctctgctcactgatgatatgattgctgcctacactgctgctctagttagtggtactgccactgctggatggacatttggtgctggcgctgctcttc |
| | | aaataccttttgctatgcaaatggcatataggttcaatggcattggagttacccaaaatgttctctatgagaaccaaaaacaaatcgccaaccaatttaacaaggcgattagtc |
| | | aaattcaagaatcacttacaacaacatcaactgcattgggcaagctgcaagacgttgttaaccagaatgctcaagcattaaacacacttgttaaacaacttagctctaattttgg |
| | | tgcaatttcaagtgtgctaaatgatatcctttcgcgacttgataaagtcgaggcggaggtacaaattgacaggttaattacaggcagacttcaaagccttcaaacctatgtaac |
| | | acaacaactaatcagggctgctgaaatcagggcttctgctaatcttgctgctactaaaatgtctgagtgtgttcttggacaatcaaaaagagttgacttttgtggaaagggcta |
| | | ccaccttatgtccttcccacaagcagccccgcatggtgttgtcttcctacatgtcacgtatgtgccatcccaggagaggaacttcaccacagcgccagcaatttgtcatgaag |
| | | gcaaagcatacttccctcgtgaaggtgtttttgtgtttaatggcacttcttggtttattacacagaggaacttatttctccacaaataattactacagacaatacatttgtctcagga |
| | | aattgtgatgtcgttattggcatcattaacaacacagtttatgatcctctgcaacctgagcttgactcattcaaagaagagctggacaagtacttcaaaaatcatacatcaccag |
| | | atgttgatcttggcgacatttcaggcattaacgcttctgtcgtcaacattcaaaaagaaattgaccgcctcaatgaggtcgctaaaaatttaaatgaatcactcattgaccttcaa |
| | | gaattgggaaaatatgagcaatatattaaatggccttggtatgtttggctcggcttcattgctggactaattgccatcgtcatggttacaatcttgattgttgcatgactagttgtt |
| | | gcagttgcctcaagggtgcatgctcttgtggttcttgctgcaagtttgatgaggatgactctgagccagttctcaagggtgtcaaattacattacacataaacgaacttatggat |
| | | ttgtttatgagattttttactcttagatcaattactgcacagccagtaaaaattgacaatgcttctcctgcaagtactgttcatgctacagcaacgataccgctacaagcctcactc |
| | | cattcggatggcttgttattggcgttgcatttcttgctgtttttcagagcgctaccaaaataattgcgctcaataaaagatggcagctagccattataagggcttccagttcattt |
| | | gcaatttactgctgctatttgttaccatctattcacatatttgcttgtcgctgcaggtatggaggcgcaatttttgtacctctatgccttgatatattttctacaatgcatcaacgcat |
| | | gtagaattattatgagatgttggctttgttggaagtgcaaatccaagaacccattactttatgatgccaactactttgtttgctggcacacacataactatgactactgtataccat |
| | | ataacagtgtcacagatacaattgtcgttactgaaggtgacggcatttcaacaccaaaactcaaagaagactaccaaattggtggttattctgaggataggcactcaggtgtt |
| | | aaagactatgtcgttgtacatggctatttcaccgaagtttactaccagcttgagtctacacaaattactacagacactggtattgaaaatgctacattcttcatctttaacaagctt |
| | | gttaaagacccaccgaatgtgcaaatacacacaatcgacggctcttcaggagttgctaatccagcaatggatccaatttatgatgagccgacgacgactactagcgtgcctt |
| | | tgtaagcacaagaaagtgagtacgaacttatgtactcattcgtttcggaagaaacaggtacgttaatagttaatagcgtacttctttttcttgattcgtggtattcttgctagtcac |
| | | actagccatccttactgcgcttcgattgtgtgcgtactgctgcaatattgttaacgtgagtttagtaaaaccaacggtttacgtctactcgcgtgttaaaaatctgaactcttctga |
| | | aggagttcctgatcttctggtctaaacgaactaactattattattattctgtttggaactttaacattgcttatcatggcagacaacggtactattaccgttgaggagcttaaacaac |
| | | tcctggaacaatggaacctagtaataggtttcctattcctagcctggattatgttactacaatttgcctattctaatcggaacaggtttttgtacataataaagcttgttttcctctgg |
| | | ctcttgtggccagtaacacttgcttgttttgtgcttgctgctgtctacagaattaattgggtgactggcgggattgcgattgcaatggcttgtattgtaggcttgatgtggcttagc |
| | | tacttcgttgcttccttcaggctgtttgctcgtacccgctcaatgtggtcattcaacccagaaacaaacattcttctcaatgtgcctctccgggggacaattgtgaccagaccgc |
| | | tcatggaaagtgaacttgtcattggtgctgtgatcattcgtggtcacttgcgaatggccggacactccctagggcgctgtgacattaaggacctgccaaaagagatcactgt |
| | | ggctacatcacgaacgattcttattacaaattaggagcgtcgcagcgtgtaggcactgattcaggttttgctgcatacaaccgctaccgtattggaaactataaattaaataca |
| | | gaccacgccggtagcaacgacaatattgattgctagtacagtaagtgacaacagatgtttcatcttgttgacttccaggttacaatagcagagatattgattatcattatgagg |
| | | actttcaggattgctatttggaatcttgacgttataataagttcaatagtgagacaattatttaagcctctaactaagaagaattattcggagttagatgatgaagaacctatggag |
| | | ttagattatccataaaacgaacatgaaaattattctcttcctgacattgattgtatttacatcttgcgagctatatcactatcaggagtgtgttagaggtacgactgtactactaaaa |
| | | gaaccttgcccatcaggaacatacgagggcaattcaccatttcaccctcttgctgacaataaatttgcactaacttgcactagcacacactttgatttgcttgtgctgacggta |
| | | ctcgacatacctatcagctgcgtgcaagatcagtttcaccaaaacttttcatcagacaagaggaggttcaacaagagctctactcgccactttttctcattgttgctgctctagta |
| | | tttttaatactttgcttcaccattaagagaaagacagaatgaatgagctcactttaattgacttctatttgtgctttttagcctttctgctattccttgttttaataatgcttattatattttg |
| | | gttttcactcgaaatccaggatctagaagaaccttgtaccaaagtctaaacgaacatgaaacttctcattgttttgacttgtatttactatgcagttgcatatgcactgtagtacagc |
| | | gctgtgcatctaataaacctcatgtgcttgaagatccttgtaaggtacaacactaggggtaatacttatagcactgcttggctttgtgctctaggaaaggttttaccttttcataga |
| | | tggcacactatggttcaaacatgcacacctaatgttactatcaactgtcaagatccagaggtggtgcgcttatagctaggtgttggtaccttcatgaaggtcaccaaactgct |
| | | gcatttagagacgtacttgttgttttaaataaacgaacaaattaaaatgtctgataatggaccccaatcaaaccaacgtagtgccccccgcattacatttggtggacccacaga |
| | | ttcaactgacaataaccagaatggaggacgcaatggggcaaggccaaaacagcgccgaccccaaggtttacccaataatactgcgtcttggttcacagctctcactcagc |
| | | atggcaaggaggaacttagattccctcgaggccagggcgttccaatcaacaccaatagtggtccagatgaccaaattggctactaccgaagagctacccgacgagttcgt |
| | | ggtggtgacggcaaaatgaaagagctcagccccagatggtacttctattacctaggaactggcccagaagcttcacttccctacggcgctaacaaagaaggcatcgtatg |
| | | ggttgcaactgagggagccttgaatacacccaaagaccacattggcacccgcaatcctaataacaatgctgccaccgtgctacaacttcctcaaggaacaacattgccaa |
| | | aaggatctacgcagagggaagcagaggcggcagtcaagcctcttctcgctcctcatcacgtagtcgcggtaattcaagaaattcaactcctggcagcagtaggggaaat |
| | | tctcctgctcgaatggctagcggaggtggtgaaactgccctcgcgctattgctgctagacagattgaaccagcttgagagcaaagtttctggtaaaggccaacaacaacaa |
| | | ggccaaactgtcactaagaaatctgctgctgaggcatctaaaaagcctcgccaaaaacgtactgccacaaaacagtacaacgtcactcaagcatttgggagacgtggtcc |
| | | agaacaaacccaaggaaatttcggggaccaagacctaatcagacaaggaactgattacaaacattggccgcaaattgcacaatttgctccaagtgcctctgcattctttgga |
| | | atgtcacgcattggcatggaagtcacaccttcgggaacatggctgacttatcatggagccattaaattggatgacaaagatccacaattcaaagacaacgtcatactgctga |
| | | acaagcacattgacgcatacaaaacattcccaccaacagagcctaaaaaggacaaaaagaaaaagactgatgaagctcagcctttgccgcagagacaaaagaagcag |
| | | cccactgtgactatatcctgcggctgacatggatgatttctccagacaacttcaaaattccatgagtggagcttctgctgattcaactcaggcataaacactcatgatgacca |
| | | cacaaggcagatgggctatgtaaacgttttcgcaattccgtttacgatacatagtctactcttgtgcagaatgaattctcgtaactaaacagcacaagtaggtttagttaacttta |
| | | atctcacatagcaatctttaatcaatgtgtaacattagggaggacttgaaagagccaccacattttcatcgaggccacgcggagtacgatcgagggtacagtgaataatgct |
| | | agggagagctgcctatatggaagagccctaatgtgtaaaattaattttagtagtgctatccccatgtgattttaatagcttcttaggagaatgacaaaaaaaaaaaaaaaaaaa |
| | | aaaaa |
| 2409 | MERS-CoV | gatttaagtgaatagcttggctatctcacttcccctcgttctcttgcagaactttgattttaacgaacttaaataaaagccctgttgtttagcgtatcgttgcacttgtctggtgggat |
| | genome | tgtggcattaatttgcctgctcatctaggcagtggacatatgctcaacactgggtataattctaattgaatactatttttcagttagagcgtcgtgtctcttgtacgtctcggtcaca |
| | (Genbank | atacacggtttcgtccggtgcgtggcaattcggggcacatcatgtctttcgtggctggtgtgaccgcgcaaggtgcgcgcggtacgtatcgagcagcgctcaactctgaaa |
| | Accession | aacatcaagaccatgtgtctctaactgtgccactctgtggttcaggaaacctggttgaaaaactttcaccatggttcatggatggcgaaaatgcctatgaagtggtgaaggcc |
| | No. | atgttacttaaaaaggagccacttctctatgtgcccatccggctggctggacacactagacacctcccaggtcctcgtgtgtacctggttgagaggctcattgcttgtgaaaat |
| | NC_ | ccattcatggttaaccaattggcttatagctctagtgcaaatggcagcctggttggcacaactttgcagggcaagcctattggtatgttcttcccttatgacatcgaacttgtcac |
| | 019843.3) | aggaaagcaaaatattctcctgcgcaagtatggccgtggtggttatcactacaccccattccactatgagcgagacaacacctcttgccctgagtggatggacgattttgag |
| | | gcggatcctaaaggcaaatatgcccagaatctgcttaagaagttgattggcggtgatgtcactccagttgaccaatacatgtgtggcgttgatggaaaacccattagtgccta |
| | | cgcatttttaatggccaaggatggaataaccaaactggctgatgttgaagcggacgtcgcagcacgtgctgatgacgaaggcttcatcacattaaagaacaatctatataga |
| | | ttggtttggcatgttgagcgtaaagacgttccatatcctaagcaatctatttttactattaatagtgtggtccaaaaggatggtgttgaaaacactcctcctcactattttactcttgg |
| | | atgcaaaattttaacgctcaccccacgcaacaagtggagtggcgtttctgacttgtccctcaaacaaaaactcctttacaccttctatggtaaggagtcacttgagaacccaac |
| | | ctacatttaccactccgcattcattgagtgtggaagttgtggtaatgattcctggcttacagggaatgctatccaagggtttgcctgtggatgtggggcatcatatacagctaat |
| | | gatgtcgaagtccaatcatctggcatgattaagccaaatgctcttctttgtgctacttgcccctttgctaagggtgatagctgttcttctaattgcaaacattcagttgctcagttgg |
| | | ttagttacctttctgaacgctgtaatgttattgctgattctaagtccttcacacttatattggtggcgtagcttacgcctactttggatgtgaggaaggtactatgtactttgtgccta |
| | | gagctaagtctgttgtctcaaggattggagactccatctttacaggctgtactggctcttggaacaaggtcactcaaattgctaacatgttcttggaacagactcagcattccct |
| | | taactttgtgggagagttcgttgtcaacgatgttgtcctcgcaattctctctggaaccacaactaatgttgacaaaatacgccagcttctcaaaggtgtcacccttgacaagttg |
| | | cgtgattatttagctgactatgacgtagcagtcactgccggcccattcatggataatgctattaatgttggtggtacaggattacagtatgccgccattactgcaccttatgtagt |
| | | tctcactggcttaggtgagtcctttaagaaagttgcaaccataccgtataaggtttgcaactctgttaaggatactctggcttattatgctcacagcgtgttgtacagagtttttcct |
| | | tatgacatggattctggtgtgtcatcctttagtgaactactttttgattgcgttgatattcagtagcttctacctattttttagtccgcatcttgcaagataagactggcgactttatgt |
| | | ctacaattattacttcctgccaaactgctgttagtaagcttctagatacatgttttgaagctacagaagcaacatttaacttcttgttagatttggcaggattgttcagaatctttctcc |
| | | gcaatgcctatgtgtacacttcacaagggtttgtggtggtcaatggcaaagtttctacacttgtcaaacaagtgttagacttgcttaataagggtatgcaacttttgcatacaaag |
| | | gtctcctgggctggttctaaaatcattgctgttatctacagcggcagggagtctctaatattcccatcgggaacctattactgtgtcaccactaaggctaagtccgttcaacaag |
| | | atcttgacgttatt-ttgcctggtgagttttccaagaagcagttaggactgctccaacctactgacaattctacaactgttagtgttactgtatccagtaacatggttgaaactgttgt |
| | | gggtcaacttgagcaaactaatatgcatagtcctgatgttatagtaggtgactatgtcattattagtgaaaaattgtttgtgcgtagtaaggaagaagacggatttgccttctacc |
| | | ctgcttgcactaatggtcatgctgtaccgactctctttagacttaagggaggtgcacctgtaaaaaaagtagcctttggcggtgatcaagtacatgaggttgctgctgtaagaa |
| | | gtgttactgtcgagtacaacattcatgctgtattagacacactacttgcttcttctagtcttagaacctttgttgtagataagtctttgtcaattgaggagtttgctgacgtagtaaag |
| | | gaacaagtctcagacttgcttgttaaattactgcgtggaatgccgattccagattttgatttagacgattttattgacgcaccatgctattgctttaacgctgagggtgatgcatcc |
| | | tggtcttctactatgatcttctctcttcaccccgtcgagtgtgacgaggagtgttctgaagtagaggcttcagatttagaagaaggtgaatcagagtgcatttctgagacttcaa |
| | | ctgaacaagttgacgtttctcatgagacttctgacgacgagtgggctgctgcagttgatgaagcgttccctctcgatgaagcagaagatgttactgaatctgtgcaagaaga |
| | | agcacaaccagtagaagtacctgttgaagatattgcgcaggttgtcatagctgacaccttacaggaaactcctgttgtgcctgatactgttgaagtcccaccgcaagtggtg |
| | | aaacttccgtctgcacctcagactatccagcccgaggtaaaagaagttgcacctgtctatgaggctgataccgaacagacacagaatgttactgttaaacctaagaggttac |
| | | gcaaaaagcgtaatgttgaccattgtccaattttgaacataaggttattacagagtgcgttaccatagttttaggtgacgcaattcaagtagccaagtgctatggggagtctgt |
| | | gttagttaatgctgctaacacacatcttaagcatggcggtggtatcgctggtgctattaatgcggcttcaaaaggggctgtccaaaaagagtcagatgagtatattctggctaa |
| | | agggccgttacaagtaggagattcagttctcttgcaaggccattctctagctaagaatatcctgcatgtcgtaggcccagatgcccgcgctaaacaggatgtttctctccttag |
| | | taagtgctataaggctatgaatgcatatcctcttgtagtcactcctcttgtttcagcaggcatatttggtgtaaaaccagctgtgtcttttgattatcttattagggaggctaagact |
| | | agagttttagtcgtcgttaattcccaagatgtctataagagtcttaccatagttgacattccacagagtttgactttttcatatgatgggttacgtggcgcaatacgtaaagctaaa |
| | | gattatggttttactgtttttgtgtgcacagacaactctgctaacactaaagttcttaggaacaagggtgttgattatactaagaagtttcttacagttgacggtgtgcaatattattg |
| | | ctacacgtctaaggacactttagatgatatcttacaacaggctaataagtagttggtattatatctatgcctttgggatatgtgtctcatggtttagacttaatgcaagcagggag |
| | | tgtcgtgcgtagagttaacgtgccctacgtgtgtctcctagctaataaagagcaagaagctattttgatgtctgaagacgttaagttaaacccttcagaagattttataaagcac |
| | | gtccgcactaatggtggttacaattcttggcatttagtcgagggtgaactattggtgcaagacttacgcttaaataagctcctgcattggtctgatcaaaccatatgctacaagg |
| | | atagtgtgttttatgttgtaaagaatagtacagcttttccatttgaaacactttcagcatgtcgtgcgtatttggattcacgcacgacacagcagttaacaatcgaagtcttagtga |
| | | ctgtcgatggtgtaaattttagaacagtcgttctaaataataagaacacttatagatcacagcttggatgcgttttattaatggtgctgatatttctgacaccattcctgatgagaa |
| | | acagaatggtcacagtttatatctagcagacaatttgactgctgatgaaacaaaggcgcttaaagagttatatggccccgttgatcctactttcttacacagattctattcactta |
| | | aggctgcagtccatgggtggaagatggttgtgtgtgataaggtacgttctctcaaattgagtgataataattgttatcttaatgcagttattatgacacttgatttattgaaggaca |
| | | ttaaatttgttatacctgactacagcatgcatttatgaaacataagggcggtgattcaactgacttcatagccctcattatggcttatggcaattgcacatttggtgaccagatg |
| | | atgcctctcggttacttcataccgtgcttgcaaaggctgagttatgctgttctgcacgcatggtttggagagagtggtgcaatgtctgtggcataaaagatgttgttctacaagg |
| | | cttaaaagcttgttgttacgtgggtgtgcaaactgttgaagatctgcgtgctcgcatgacatatgtatgccagtgtggtggtgaacgtcatcggcaattagtcgaacacacca |
| | | ccccctggttgctgctctcaggcacaccaaatgaaaaattggtgacaacctccacggcgcctgattttgtagcatttaatgtctttcagggcattgaaacggctgttggccatt |
| | | atgttcatgctcgcctgaagggtggtcttattttaaagtttgactaggcaccgttagcaagacttcagactggaagtgcaaggtgacagatgtacttttccccggccaaaaat |
| | | acagtagcgattgtaatgtcgtacggtattctttggacggtaatttcagaacagaggttgatcccgacctatctgctttctatgttaaggatggtaaatactttacaagtgaacca |
| | | cccgtaacatattcaccagctacaattttagctggtagtgtctacactaatagctgccttgtatcgtctgatggacaacctggcggtgatgctattagtttgagttttaataaccttt |
| | | tagggtttgattctagtaaaccagtcactaagaaatacacttactccttcttgcctaaagaagacggcgatgtgttgttggctgagtttgacacttatgaccctatttataagaatg |
| | | gtgccatgtataaaggcaaaccaattctttgggtcaataaagcatcttatgatactaatcttaataagttcaatagagctagtttgcgtcaaatttttgacgtagcccccattgaac |
| | | tcgaaaataaattcacacctttgagtgtggagtctacaccagttgaacctccaactgtagatgtggtagcacttcaacaggaaatgacaattgtcaaatgtaagggtttaaata |
| | | aacctttcgtgaaggacaatgtcagtttcgttgctgatgattcaggtactcccgttgttgagtatctgtctaaagaagacctacatacattgtatgtagaccctaagtatcaagtc |
| | | attgtcttaaaagacaatgtactttcttctatgcttagattgcacaccgttgagtcaggtgatattaacgttgttgcagcttccggatctttgacacgtaaagtgaagttactattta |
| | | gggcttcattttatttcaaagaatttgctacccgcactttcactgctaccactgctgtaggtagttgtataaagagtgtagtgcggcatctaggtgttactaaaggcatattgaca |
| | | ggctgttttagttttgccaagatgttatttatgcttccactagcttactttagtgattcaaaactcggcaccacagaggttaaagtgagtgattgaaaacagccggcgttgtgac |
| | | aggtaatgttgtaaaacagtgttgcactgctgctgttgatttaagtatggataagttgcgccgtgtggattggaaatcaaccctacggttgttacttatgttatgcacaactatggt |
| | | attgttgtcttctgtgtatcacttgtatgtcttcaatcaggtcttatcaagtgatgttatgtttgaagatgcccaaggtttgaaaaagttctacaaagaagttagagcttacctagga |
| | | atctcttctgcttgtgacggtcttgcttcagcttatagggcgaattcctttgatgtacctacattctgcgcaaaccgttctgcaatgtgtaattggtgcttgattagccaagattcca |
| | | taactcactacccagctcttaagatggttcaaacacatcttagccactatgttcttaacatagattggttgtggtttgcatttgagactggtttggcatacatgctctatacctcggc |
| | | cttcaactggttgttgttggcaggtacattgcattatttctttgcacagacttccatatttgtagactggcggtcatacaattatgctgtgtctagtgccttctggttattcacccacat |
| | | tccaatggcgggtttggtacgaatgtataatttgttagcatgcctttggcttttacgcaagttttatcagcatgtaatcaatggttgcaaagatacggcatgcttgctctgctataa |
| | | gaggaaccgacttactagagttgaagcttctaccgttgtagtggtggaaaacgtacgttttatatcacagcaaatggcggtatttcattctgtcgtaggcataattggaattgt |
| | | gtggattgtgacactgcaggtgtggggaataccttcatctgtgaagaagtcgcaaatgacctcactaccgccctacgcaggcctattaacgctacggatagatcacattatta |
| | | tgtggattccgttacagttaaagagactgttgttcagtttaattatcgtagagacggtcaaccattctacgagcggtttcccctctgcgcttttacaaatctagataagttgaagtt |
| | | caaagaggtagtaaaactactactggtatacctgaatacaactttatcatctacgactcatcagatcgtggccaggaaagtttagctaggtctgcatgtgtttattattctcaagt |
| | | cttgtgtaaatcaattcttttggttgactcaagtttggttacttctgttggtgattctagtgaaatcgccactaaaatgtttgattcctttgttaatagtttcgtctcgctgtataatgtca |
| | | cacgcgataagttggaaaaacttatctctactgctcgtgatggcgtaaggcgaggcgataacttccatagtgtcttaacaacattcattgacgcagcacgaggccccgcag |
| | | gtgtggagtctgatgttgagaccaatgaaattgttgactctgtgcagtatgctcataaacatgacatacaaattactaatgagagctacaataattatgtaccctcatatgttaaa |
| | | cctgatagtgtgtctaccagcgatttaggtagtctcattgattgtaatgcggcttcagttaaccaaattgtcttgcgtaattctaatggtgcttgcatttggaacgctgctgcatata |
| | | tgaaactctcggatgcacttaaacgacagattcgcattgcatgccgtaagtgtaatttagctttccggttaaccacctcaaagctacgcgctaatgataatatcttatcagttaga |
| | | ttcactgctaacaaaattgttggtggtgctcctacatggtttaatgcgttgcgtgactttacgttaaagggttatgttcttgctaccattattgtgtttctgtgtgctgtactgatgtatt |
| | | tgtgtttacctacattttctatggcacctgttgaattttatgaagaccgcatcttggactttaaagttcttgataatggtatcattagggatgtaaatcctgatgataagtgattgcta |
| | | ataagcaccggtccttcacacaatggtatcatgagcatgttggtggtgtctatgacaactctatcacatgcccattgacagttgcagtaattgctggagttgctggtgctcgcat |
| | | tccagacgtacctactacattggcttgggtgaacaatcagataattttattgtttctcgagtctttgctaatacaggcagtgtttgctacactcctatagatgagataccctataag |
| | | agtttctctgatagtggttgcattcttccatctgagtgcactatgtttagggatgcagagggccgtatgacaccatactgccatgatcctactgttttgcctggggcttttgcgtac |
| | | agtcagatgaggcctcatgttcgttacgacttgtatgatggtaacatgtttattaaatttcctgaagtagtatttgaaagtacacttaggattactagaactctgtcaactcagtact |
| | | gccggttcggtagttgtgagtatgcacaagagggtgtttgtattaccacaaatggctcgtgggccatttttaatgaccaccatcttaatagacctggtgtctattgtggctctgat |
| | | tttattgacattgtcaggcggttagcagtatcactgttccagcctattacttatttccaattgactacctcattggtcttgggtataggtttgtgtgcgttcctgactttgctcttctatt |
| | | atattaataaagtaaaacgtgatttgcagattacacccagtgtgctgtaattgctgttgttgctgctgttcttaatagcttgtgcatctgctttgttacctctataccattgtgtatagt |
| | | accttacactgcattgtactattatgctacattctattttactaatgagcctgcatttattatgcatgtttcttggtacattatgttcgggcctatcgttcccatatggatgacctgcgtc |
| | | tatacagttgcaatgtgattagacacttcttctgggttttagcttattttagtaagaaacatgtagaagtttttactgatggtaagcttaattgtagtttccaggacgctgcctctaat |
| | | atctttgttattaacaaggacacttatgcagctcttagaaactctttaactaatgatgcctattcacgatttttggggttgtttaacaagtataagtacttctctggtgctatggaaac |
| | | agccgcttatcgtgaagctgcagcatgtcatcttgctaaagccttacaaacatacagcgagactggtagtgatcttctttaccaaccacccaactgtagcataacctaggcgt |
| | | gttgcaaagcggtttggtgaaaatgtcacatcccagtggagatgttgaggcttgtatggttcaggttacctgcggtagcatgactcttaatggtctttggcttgacaacacagt |
| | | ctggtgcccacgacacgtaatgtgcccggctgaccagttgtctgatcctaattatgatgccttgttgatttctatgactaatcatagtttcagtgtgcaaaaacacattggcgctc |
| | | cagcaaacttgcgtgttgttggtcatgccatgcaaggcactcttttgaagttgactgtcgatgttgctaaccctagcactccagcctacacttttacaacagtgaaacctggcg |
| | | cagcatttagtgtgttagcatgctataatggtcgtccgactggtacattcactgttgtaatgcgccctaactacacaattaagggttcctttctgtgtggttcttgtggtagtgttgg |
| | | ttacaccaaggagggtagtgtgatcaatttctgttacatgcatcaaatggaacttgctaatggtacacataccggttcagcatttgatggtactatgtatggtgcctttatggata |
| | | aacaagtgcaccaagttcagttaacagacaaatactgcagtgttaatgtagtagcttggctttacgcagcaatacttaatggttgcgcttggtttgtaaaacctaatcgcactag |
| | | tgttgtttcttttaatgaatgggctcttgccaaccaattcactgaatttgttggcactcaatccgttgacatgttagctgtcaaaacaggcgttgctattgaacagctgattatgcg |
| | | atccaacaactgtatactgggttccagggaaagcaaatccttggcagtaccatgttggaagatgaattcacacctgaggatgttaatatgcagattatgggtgtggttatgca |
| | | gagtggtgtgagaaaagttacatatggtactgcgcattggttgtttgcgacccttgtctcaacctatgtgataatcttacaagccactaaatttactttgtggaactacttgtttga |
| | | gactattcccacacagttgttcccactcttatttgtgactatggccttcgttatgttgttggttaaacacaaacacacctttttgacacttttcttgttgcctgtggctatttgtttgactt |
| | | atgcaaacatagtctacgagcccactactcccatttcgtcagcgctgattgcagttgcaaattggcttgcccccactaatgcttatatgcgcactacacatactgatattggtgt |
| | | ctacattagtatgtcacttgtattagtcattgtagtgaagagattgtacaacccatcactttctaactttgcgttagcattgtgcagtggtgtaatgtggttgtacacttatagcattg |
| | | gagaagcctcaagccccattgcctatctggtttttgtcactacactcactagtgattatacgattacagtctttgttactgtcaaccttgcaaaagtttgcacttatgccatctttgct |
| | | tactcaccacagcttacacttgtgtttccggaagtgaagatgatacttttattatacacatgtttaggtttcatgtgtacttgctattttggtgtcttctctcttttgaaccttaagcttag |
| | | agcacctatgggtgtctatgactttaaggtctcaacacaagagttcagattcatgactgctaacaatctaactgcacctagaaattcttgggaggctatggctctgaactttaag |
| | | ttaataggtattggcggtacaccttgtataaaggttgctgctatgcagtctaaacttacagatcttaaatgcacatctgtggttctcctctctgtgctccaacagttacacttagag |
| | | gctaatagtagggcctgggctttctgtgttaaatgccataatgatatattggcagcaacagaccccagtgaggctttcgagaaattcgtaagtctctttgctactttaatgactttt |
| | | tctggtaatgtagatcttgatgcgttagctagtgatatttttgacactcctagcgtacttcaagctactctttctgagttttcacacttagctacctttgctgagttggaagctgcgca |
| | | gaaagcctatcaggaagctatggactaggtgacacctcaccacaagttcttaaggctttgcagaaggctgttaatatagctaaaaacgcctatgagaaggataaggcagt |
| | | ggcccgtaagttagaacgtatggctgatcaggctatgacttctatgtataagcaagcacgtgctgaagacaagaaagcaaaaattgtcagtgctatgcaaactatgttgtttg |
| | | gtatgattaagaagctcgacaacgatgttcttaatggtatcatttctaacgctaggaatggttgtatacctcttagtgtcatcccactgtgtgcttcaaataaacttcgcgttgtaat |
| | | tcctgacttcaccgtaggaatcaggtagtcacatatccctcgcttaactacgctggggctttgtgggacattacagttataaacaatgtggacaatgaaattgttaagtcttca |
| | | gatgttgtagacagcaatgaaaatttaacatggccacttgttttagaatgcactagggcatccacttctgccgttaagttgcaaaataatgagatcaaaccttcaggtctaaaaa |
| | | ccatggttgtgtctgcgggtcaagagcaaactaactgtaatactagttccttagcttattacgaacctgtgcagggtcgtaaaatgctgatggctcttctttctgataatgcctat |
| | | ctcaaatgggcgcgtgttgaaggtaaggacggatttgtcagtgtagagctacaacctccttgcaaattcttgattgcgggaccaaaaggacctgaaatccgatatctctatttt |
| | | gttaaaaatcttaacaaccttcatcgcgggcaagtgttagggcacattgctgcgactgttagattgcaagctggttctaacaccgagtttgcctctaattcctcggtgttgtcact |
| | | tgttaacttcaccgttgatcctcaaaaagcttatctcgatttcgtcaatgcgggaggtgccccattgacaaattgtgttaagatgcttactcctaaaactggtacaggtatagcta |
| | | tatctgttaaaccagagagtacagctgatcaagagacttatggtggagcttcagtgtgtactattgccgtgcgcatatagaacatcctgatgtactggtgtttgtaaatataag |
| | | ggtaagtttgtccaaatccctgctcagtgtgtccgtgaccctgtgggattttgtttgtcaaataccccctgtaatgtctgtcaatattggattggatatgggtgcaattgtgactcg |
| | | cttaggcaagcagcactgccccaatctaaagattccaattttttaaacgagtccggggttctattgtaaatgcccgaatagaaccctgttcaagtggtttgtccactgatgtcgt |
| | | ctttagggcatttgacatctgcaactataaggctaaggttgctggtattggaaaatactacaagactaatacttgtaggtttgtagaattagatgaccaagggcatcatttagact |
| | | cctattttgtcgttaagaggcatactatggagaattatgaactagagaagcactgttacgacttgttacgtgactgtgatgctgtagctccccatgatttcttcatctttgatgtag |
| | | acaaagttaaaacacctcatattgtacgtcagcgtttaactgagtacactatgatggatcttgtatatgccctgaggcactttgatcaaaatagcgaagtgcttaaggctatctta |
| | | gtgaagtatggttgctgtgatgttacctactttgaaaataaactctggtttgattttgttgaaaatcccagtgttattggtgtttatcataaacttggagaacgtgtacgccaagcta |
| | | tcttaaacactgttaaattttgtgaccacatggtcaaggctggtttagtcggtgtgctcacactagacaaccaggaccttaatggcaagtggtatgattttggtgacttcgtaatc |
| | | actcaacctggttcaggagtagctatagttgatagctactattcttatttgatgcctgtgctctcaatgaccgattgtctggccgctgagacacatagggattgtgattttaataaa |
| | | ccactcattgagtggccacttactgagtatgattttactgattataaggtacaactattgagaagtactttaaatattgggatcagacgtatcacgcaaattgcgttaattgtactg |
| | | atgaccgttgtgtgttacattgtgctaatttcaatgtattgtttgctatgaccatgcctaagacttgtttcggacccatagtccgaaagatctttgttgatggcgtgccatttgtagta |
| | | tcttgtggttatcactacaaagaattaggtttagtcatgaatatggatgttagtaccatagacataggctctctcttaaggagttgatgatgtatgccgctgatccagccatgca |
| | | cattgcctcctctaacgcttttcttgatttgaggacatcatgttttagtgtcgctgcacttacaactggtttgacttttcaaactgtgcggcctggcaattttaaccaagacttctatg |
| | | atttcgtggtatctaaaggtttctttaaggagggctcttcagtgacgctcaaacattttttctttgctcaagatggtaatgctgctattacagattataattactattcttataatctgcc |
| | | tactatgtgtgacatcaaacaaatgttgttctgcatggaagttgtaaacaagtacttcgaaatctatgacggtggttgtcttaatgcttctgaagtggttgttaataatttagacaa |
| | | gagtgctggccatccttttaataagtttggcaaagctcgtgtctattatgagagcatgtcttaccaggagcaagatgaactttttgccatgacaaagcgtaacgtcattcctacc |
| | | atgactcaaatgaatctaaaatatgctattagtgctaagaatagagctcgcactgttgcaggcgtgtccatacttagcacaatgactaatcgccagtaccatcagaaaatgctt |
| | | aagtccatggctgcaactcgtggagcgacttgcgtcattggtactacaaagttctacggtggctgggatttcatgcttaaaacattgtacaaagatgttgataatccgcatctta |
| | | tgggttgggattaccctaagtgtgatagagctatgcctaatatgtgtagaatcttcgcttcactcatattagctcgtaaacatggcacttgttgtactacaagggacagattttatc |
| | | gcttggcaaatgagtgtgctcaggtgctaagcgaatatgttctatgtggtggtggttactacgtcaaacctggaggtaccagtagcggagatgccaccactgcatatgccaa |
| | | tagtgtctttaacattttgcaggcgacaactgctaatgtcagtgcacttatgggtgctaatggcaacaagattgttgacaaagaagttaaagacatgcagtttgatttgtatgtca |
| | | atgtttacaggagcactagcccagaccccaaatttgttgataaatactatgatttcttaataagcacttttctatgatgatactgtctgatgacggtgtcgtttgctataatagtgat |
| | | tatgcagctaagggttacattgctggaatacagaattttaaggaaacgctgtattatcagaacaatgtctttatgtctgaagctaaatgctgggtggaaaccgatctgaagaaa |
| | | gggccacatgaattctgttcacagcatacgattatattaaggatggcgacgatggttacttccttccttatccagacccttcaagaattttgtctgccggttgattgtagatgat |
| | | atcgttaagactgacggtacactcatggtagagcggtttgtgtctttggctatagatgcttaccctctcacaaagcatgaagatatagaataccagaatgtattctgggtctactt |
| | | acagtatatagaaaaactgtataaagaccttacaggacacatgcttgacagttattctgtcatgctatgtggtgataattctgctaagttttgggaagaggcattctatagagatc |
| | | tctatagttcgcctaccactttgcaggctgtcggttcatgcgttgtatgccattcacagacttccctacgctgtgggacatgcatccgtagaccatttctctgctgtaaatgctgc |
| | | tatgatcatgttatagcaactccacataagatggttttgtctgtttctccttacgtttgtaatgcccctggttgtggcgtttcagacgttactaagctatatttaggtggtatgagcta |
| | | cttttgtgtagatcatagacctgtgtgtagttttccactttgcgctaatggtcttgtattcggcttatacaagaatatgtgcacaggtagtccttctatagttgaatttaataggttggc |
| | | tacctgtgactggactgaaagtggtgattacacccttgccaatactacaacagaaccactcaaactttttgctgctgagactttacgtgccactgaagaggcgtctaagcagt |
| | | cttatgctattgccaccatcaaagaaattgttggtgagcgccaactattacttgtgtgggaggctggcaagtccaaaccaccactcaatcgtaattatgtttttactggttatcat |
| | | ataaccaaaaatagtaaagtgcagctcggtgagtacattttcgagcgcattgattatagtgatgctgtatcctacaagtctagtacaacgtataaactgactgtaggtgacatct |
| | | tcgtacttacctctcactctgtggctaccttgacggcgcccacaattgtgaatcaagagaggtatgttaaaattactgggttgtacccaaccattacggtacctgaagagttcg |
| | | caagtcatgttgccaacttccaaaaatcaggttatagtaaatatgtcactgttcagggaccacctggcactggcaaaagtcattttgctatagggttagcgatttactaccctac |
| | | agcacgtgttgtttatacagcatgttcacacgcagctgttgatgattgtgtgaaaaagcttttaaatatttgaacattgctaaatgttcccgtatcattcctgcaaaggcacgtgtt |
| | | gagtgctatgacaggtttaaagttaatgagacaaattctcaatatttgtttagtactattaatgactaccagaaacttctgccgatattctggtggttgatgaggttagtatgtgca |
| | | ctaattatgatattcaattattaatgcacgtattaaagctaagcacattgtctatgtaggagatccagcacagttgccagctcctaggactttgttgactagaggcacattggaa |
| | | ccagaaaatttcaatagtgtcactagattgatgtgtaacttaggtcctgacatatttttaagtatgtgctacaggtgtcctaaggaaatagtaagcactgtgagcgctcttgtcta |
| | | caataataaattgttagccaagaaggagctttcaggccagtgctttaaaatactctataagggcaatgtgacgcatgatgctagctctgccattaatagaccacaactcacatt |
| | | tgtgaagaattttattactgccaatccggcatggagtaaggcagtctttatttcgccttacaattcacagaatgctgtgtctcgttcaatgctgggtcttaccactcagactgttga |
| | | ttcctcacagggttcagaataccagtacgttatcttctgtcaaacagcagatacggcacatgctaacaacattaacagatttaatgttgcaatcactcgtgcccaaaaaggtatt |
| | | ctttgtgttatgacatctcaggcactctttgagtccttagagtttactgaattgtatttactaattacaagctccagtctcagattgtaactggcctttttaaagattgctctagagaa |
| | | acttctggcctctcacctgcttatgcaccaacatatgttagtgttgatgacaagtataagacgagtgatgagctttgcgtgaatcttaatttacccgcaaatgtcccatactctcgt |
| | | gttatttccaggatgggctttaaactcgatgcaacagttcctggatatcctaagcttttcattactcgtgaagaggctgtaaggcaagttcgaagctggataggcttcgatgttg |
| | | agggtgctcatgcttcccgtaatgcatgtggcaccaatgtgcctctacaattaggattttcaactggtgtgaactttgttgttcagccagttggtgttgtagacactgagtgggg |
| | | taacatgttaacgggcattgctgcacgtcctccaccaggtgaacagtttaagcacctcgtgcctcttatgcataagggggctgcgtggcctattgttagacgacgtatagtgc |
| | | aaatgttgtcagacactttagacaaattgtctgattactgtacgtttgtttgttgggctcatggctttgaattaacgtctgcatcatacttttgcaagataggtaaggaacagaagt |
| | | gttgcatgtgcaatagacgcgctgcagcgtactcttcacctctgcaatcttatgcctgctggactcattcctgcggttatgattatgtctacaaccctttctttgtcgatgttcaaca |
| | | gtggggttatgtaggcaatcttgctactaatcacgatcgttattgctctgtccatcaaggagctcatgtggcttctaatgatgcaataatgactcgttgtttagctattcattcttgtt |
| | | ttatagaacgtgtggattgggatatagagtatccttatatctcacatgaaaagaaattgaattcctgttgtagaatcgttgagcgcaacgtcgtacgtgctgctcttcttgccggt |
| | | tcatttgacaaagtctatgatattggcaatcctaaaggaattcctattgttgatgaccagtggttgattggcattattttgatgcacagcccttgaccaggaaggtacaacagct |
| | | tttctatacagaggacatggcctcaagatttgctgatgggctctgcttattttggaactgtaatgtaccaaaatatcctaataatgcaattgtatgcaggtttgacacacgtgtgc |
| | | attctgagttcaatttgccaggttgtgatggcggtagtttgtatgttaacaagcacgcttttcatacaccagcatatgatgtgagtgcattccgtgatctgaaacctttaccattctt |
| | | ttattattctactacaccatgtgaagtgcatggtaatggtagtatgatagaggatattgattatgtacccctaaaatctgcagtagtattacagcttgtaatttagggggcgctgtt |
| | | tgtaggaagcatgctacagagtacagagagtatatggaagcatataatcttgtactgcatcaggtttccgcctttggtgttataagacctttgatatttataatctctggtctactt |
| | | ttacaaaagttcaaggtttggaaaacattgatttaatgttgttaaacaaggccattttattggtgttgagggtgaactacctgtagctgtagtcaatgataagatcttcaccaaga |
| | | gtggcgttaatgacatttgtatgtttgagaataaaaccactttgcctactaatatagcttttgaactctatgctaagcgtgctgtacgctcgcatcccgatttcaaattgctacaca |
| | | atttacaagcagacatttgctacaagttcgtcctttgggattatgaacgtagcaatatttatggtactgctactattggtgtatgtaagtacactgatattgatgttaattcagctttg |
| | | aatatatgttttgacatacgcgataattgttcattggagaagttcatgtctactcccaatgccatctttatttctgatagaaaaatcaagaaatacccttgtatggtaggtcctgatta |
| | | tgcttacttcaatggtgctatcatccgtgatagtgatgttgttaaacaaccagtgaagttctacttgtataagaaagtcaataatgagtttattgatcctactgagtgtatttacactc |
| | | agagtcgctcttgtagtgacttcctacccattctgacatggagaaagactttctatcttttgatagtgatgttttcattaagaagtatggcttggaaaactatgatttgagcacgt |
| | | agtctatggagacttctctcatactacgttaggcggtcttcacttgcttattggtttatacaagaagcaacaggaaggtcatattattatggaagaaatgctaaaaggtagctca |
| | | actattcataactattttattactgagactaacacagcggcttttaaggcggtgtgttctgttatagatttaaagcttgacgactttgttatgattttaaagagtcaagaccttggcgt |
| | | agtatccaaggttgtcaaggttcctattgacttaacaatgattgagtttatgttatggtgtaaggatggacaggttcaaaccttctaccctcgactccaggcttctgcagattgga |
| | | aacctggtcatgcaatgccatccctctttaaagttcaaaatgtaaaccttgaacgttgtgagcttgctaattacaagcaatctattcctatgcctcgcggtgtgcacatgaacatc |
| | | gctaaatatatgcaattgtgccagtatttaaatacttgcacattagccgtgcctgccaatatgcgtgttatacattttggcgctggttctgataaaggtatcgctcctggtacctca |
| | | gttttacgacagtggcttcctacagatgccattattatagataatgatttaaatgagttcgtgtcagatgctgacataactttatttggagattgtgtaactgtacgtgtcggccaa |
| | | caagtggatcttgttatttccgacatgtatgatcctactactaagaatgtaacaggtagtaatgagtcaaaggctttattctttacttacctgtgtaacctcattaataataatcttgct |
| | | cttggtgggtctgttgctattaaaataacagaacactcttggagcgttgaactttatgaacttatgggaaaatttgcttggtggactgttttctgcaccaatgcaaatgcatcctca |
| | | tctgaaggattcctcttaggtattaattacttgggtactattaaagaaaatatagatggtggtgctatgcacgccaactatatattttggagaaattccactcctatgaatctgagta |
| | | cttactcactttttgatttatccaagtttcaattaaaattaaaaggaacaccagttcttcaattaaaggagagtcaaattaacgaactcgtaatatctctcctgtcgcagggtaagtt |
| | | acttatccgtgacaatgatacactcagtgtttctactgatgttcttgttaacacctacagaaagttacgttgatgtagggccagattctgttaagtagcttgtattgaggttgatat |
| | | acaacagactttattgataaaacttggcctaggccaattgatgtttctaaggctgacggtattatataccctcaaggccgtacatattctaacataactatcacttatcaaggtct |
| | | ttttccctatcagggagaccatggtgatatgtatgtttactctgcaggacatgctacaggcacaactccacaaaagttgtttgtagctaactattctcaggacgtcaaacagtttg |
| | | ctaatgggtttgtcgtccgtataggagcagctgccaattccactggcactgttattattagcccatctaccagcgctactatacgaaaaatttaccctgatttatgctgggttctt |
| | | cagttggtaatttctcagatggtaaaatgggccgcttcttcaatcatactctagttcttttgcccgatggatgtggcactttacttagagctttttattgtattctagagcctcgctct |
| | | ggaaatcattgtcctgctggcaattcctatacttatttgccacttatcacactcctgcaacagattgttctgatggcaattacaatcgtaatgccagtctgaactcttttaaggagt |
| | | attttaatttacgtaactgcacctttatgtacacttataacattaccgaagatgagattttagagtggtttggcattacacaaactgctcaaggtgttcacctcttctcatctcggtat |
| | | gttgatttgtacggcggcaatatgtttcaatttgccaccttgcctgtttatgatactattaagtattattctatcattcctcacagtattcgttctatccaaagtgatagaaaagcttgg |
| | | gctgccttctacgtatataaacttcaaccgttaactttcctgttggatttttctgttgatggttatatacgcagagctatagactgtggttttaatgatttgtcacaactccactgctca |
| | | tatgaatccttcgatgttgaatctggagtttattcagtttcgtctttcgaagcaaaaccttctggctcagttgtggaacaggctgaaggtgttgaatgtgatttttcacctcttctgtc |
| | | tggcacacctcctcaggtttataatttcaagcgtttggtttttaccaattgcaattataatcttaccaaattgattcacttttttctgtgaatgattttacttgtagtcaaatatctccagc |
| | | agcaattgctagcaactgttattcttcactgattttggattacttttcatacccacttagtatgaaatccgatctcagtgttagttctgctggtccaatatcccagtttaattataaaca |
| | | gtccttttctaatcccacatgtttgattttagcgactgttcctcataaccttactactattactaagcctcttaagtacagctatattaacaagtgctctcgtcttattctgatgatcgta |
| | | ctgaagtacctcagttagtgaacgctaatcaatactcaccagtgtatccattgtcccatccactgtgtgggaagacggtgattattataggaaacaactatctccacttgaagg |
| | | tggtggctggcttgttgctagtggctcaactgttgccatgactgagcaattacagatgggctttggtattacagttcaatatggtacagacaccaatagtgtttgccccaagctt |
| | | gaatttgctaatgacacaaaaattgcctctcaattaggcaattgcgtggaatattccctctatggtgtttcgggccgtggtgtttttcagaattgcacagctgtaggtgttcgaca |
| | | gcagcgctttgtttatgatgcgtaccagaatttagttggctattattctgatgatggcaactactactgtttgcgtgcttgtgttagtgttcctgtttctgtcatctatgataaagaaac |
| | | taaaacccacgctactctatttggtagtgttgcatgtgaacacatttcttctaccatgtctcaatactcccgttctacgcgatcaatgcttaaacggcgagattctacatatggccc |
| | | ccttcagacacctgttggttgtgtcctaggacttgttaattcctctttgttcgtagaggactgcaagttgcctcttggtcaatctctctgtgctcttcctgacacacctagtactctca |
| | | cacctcgcagtgtgcgctctgttccaggtgaaatgcgcttggcatccattgatttaatcatcctattcaggttgatcaacttaatagtagttattttaaattaagtatacccactaat |
| | | ttttcctttggtgtgactcaggagtacattcagacaaccattcagaaagttactgttgattgtaaacagtacgtttgcaatggtttccagaagtgtgagcaattactgcgcgagta |
| | | tggccagttttgttccaaaataaaccaggctctccatggtgccaatttacgccaggatgattctgtacgtaatttgtttgcgagcgtgaaaagctctcaatcatctcctatcatac |
| | | caggttttggaggtgactttaatttgacacttctagaacctgtttctatatctactggcagtcgtagtgcacgtagtgctattgaggatttgctatttgacaaagtcactatagctga |
| | | tcctggttatatgcaaggttacgatgattgcatgcagcaaggtccagcatcagctcgtgatcttatttgtgctcaatatgtggctggttacaaagtattacctcctcttatggatgt |
| | | taatatggaagccgcgtatacttcatctttgcttggcagcatagcaggtgttggctggactgctggcttatcctcctttgctgctattccatttgcacagagtatcttttataggtta |
| | | aacggtgttggcattactcaacaggttattcagagaaccaaaagcttattgccaataagtttaatcaggctctgggagctatgcaaacaggcttcactacaactaatgaagct |
| | | tttcagaaggttcaggatgctgtgaacaacaatgcacaggctctatccaaattagctagcgagctatctaatacttttggtgctatttccgcctctattggagacatcatacaac |
| | | gtcttgatgttctcgaacaggacgcccaaatagacagacttattaatggccgtttgacaacactaaatgatttgttgcacagcagcttgttcgttccgaatcagctgactttcc |
| | | gctcaattggctaaagataaagtcaatgagtgtgtcaaggcacaatccaagcgttctggattttgcggtcaaggcacacatatagtgtcctttgttgtaaatgcccctaatggc |
| | | ctttacttcatgcatgttggttattaccctagcaaccacattgaggttgtttctgcttatggtattgcgatgcagctaaccctactaattgtatagcccctgttaatggctactttatt |
| | | aaaactaataacactaggattgttgatgagtggtcatatactggctcgtccttctatgcacctgagcccattacctcccttaatactaagtatgttgcaccacaggtgacatacc |
| | | aaaacatttctactaacctccctcctcctcttctcggcaattccaccgggattgacttccaagatgagttggatgagtttttcaaaaatgttagcaccagtatacctaattttggttc |
| | | cctaacacagattaatactacattactcgatcttacctacgagatgttgtacttcaacaagttgttaaagccdtaatgagtcttacatagaccttaaagagcttggcaattatact |
| | | tattacaacaaatggccgtggtacatttggcttggtttcattgctgggcttgttgccttagctctatgcgtcttcttcatactgtgctgcactggttgtggcacaaactgtatggga |
| | | aaacttaagtgtaatcgttgttgtgatagatacgaggaatacgacctcgagccgcataaggttcatgttcactaattaacgaactattaatgagagttcaaagaccacccactc |
| | | tcttgttagtgttttcactctctatttggtcactgcatcctcaaaacctctctatgtacctgagcattgtcagaattattctggttgcatgcttagggcttgtattaaaactgcccaag |
| | | ctgatacagaggtattatacaaattttcgaattgacgtcccatctgcagaatcaactggtactcaatcagtttctgtcgatcttgagtcaacttcaactcatgatggtcctaccg |
| | | aacatgttactagtgtgaatattttgacgttggttactcagttaattaacgaactctatggattacgtgtactgcttaatcaaatttggcagaagtaccttaactcaccgtatacta |
| | | cttgtttgtacatccctaaacccacagctaagtatacacctttagttggcacttcattgcaccctgtgctgtggaactgtcagctatcctttgctggttatactgaatctgctgttaat |
| | | tctacaaaagattggccaaacaggacgcagctcagcgaatcgcttggttgctacataaggatggaggaatccctgatggatgttccctctacctccggcactcaagtttatt |
| | | cgcgcaaagcgaggaagaggagccattaccaactaagaaactgcgctacgttaagcgtagattttctcttctgcgccatgaagaccttagtgttattgtccaaccaacaca |
| | | ctatgtcagggttacattttcagaccccaacatgtggtatctacgttcgggtcatcatttacactcagttcacaattggcttaaaccttatggcggccaacctgtttctgagtacca |
| | | tattactctagattgctaaatctcactgatgaagatttagctagagatttttcacccattgcgctattttgcgcaatgtcagatttgagctacatgagttcgccttgctgcgcaaa |
| | | actcttgttcttaatgcatcagagatctactgtgctaacatacatagatttaagcctgtgtatagagttaacacggcaatccctactattaaggattggcttctcgttcagggatttt |
| | | ccdttaccatagtggcctccattacatatgtcaatctctaaattgcatgcactggatgatgttactcgcaattacatcattacaatgccatgctttagaacttaccdcaacaaat |
| | | gtttgttactcctttggccgtagatgttgtctccatacggtcttccaatcagggtaataaacaaattgttcattcttatcccattttacatcatccaggattttaacgaactatggcttt |
| | | ctcggcgtctttatttaaacccgtccagctagtcccagtttctcctgcatttcatcgcattgagtctactgactctattgttttcacatacattcctgctagcggctatgtagctgatt |
| | | agctgtcaatgtgtgtctcattcccctattattactgctacgtcaagatacttgtcgtcgcagcattatcagaactatggttctctatttccttgttctgtataactttttattagccattg |
| | | tactagtcaatggtgtacattatccaactggaagttgcctgatagccttcttagttatcctcataatactttggtttgtagatagaattcgtttctgtctcatgctgaattcctacattc |
| | | cactgtttgacatgcgttcccactttattcgtgttagtacagtttcttctcatggtatggtccctgtaatacacaccaaaccattatttattagaaacttcgatcagcgttgcagctgt |
| | | tctcgttgtttttatttgcactcttccacttatatagagtgcacttatattagccgttttagtaagattagcctagtttctgtaactgacttctccttaaacggcaatgtttccactgttttc |
| | | gtgcctgcaacgcgcgattcagttcctcttcacataatcgccccgagctcgcttatcgtttaagcagctctgcgctactatgggtcccgtgtagaggctaatccattagtctctc |
| | | tttggacatatggaaaacgaactatgttaccdttgtccaagaacgaatagggttgttcatagtaaactttttcatttttaccgtagtatgtgctataacactcttggtgtgtatggct |
| | | ttccttacggctactagattatgtgtgcaatgtatgacaggcttcaataccctgttagttcagcccgcattatacttgtataatactggacgttcagtctatgtaaaattccaggata |
| | | gtaaaccccctctaccacctgacgagtgggtttaacgaactccttcataatgtctaatatgacgcaactcactgaggcgcagattattgccattattaaagactggaactttgc |
| | | atggtccctgatctttctcttaattactatcgtactacagtatggatacccatcccgtagtatgactgtctatgtctttaaaatgtttgttttatggctcctatggccatcttccatggc |
| | | gctatcaatatttagcgccgtttatccaattgatctagatcccagataatctctggcattgtagcagctgtttcagctatgatgtggatttcctactttgtgcagagtatccggctg |
| | | tttatgagaactggatcatggtggtcattcaatcctgagactaattgccttttgaacgttccatttggtggtacaactgtcgtacgtccactcgtagaggactctaccagtgtaac |
| | | tgctgttgtaaccaatggccacctcaaaatggctggcatgcatttcggtgcttgtgactacgacagacttcctaatgaagtcaccgtggccaaacccaatgtgctgattgcttt |
| | | aaaaatggtgaagcggcaaagctacggaactaattccggcgttgccatttaccatagatataaggcaggtaattacaggagtccgcctattacggcggatattgaacttgca |
| | | ttgcttcgagcttaggctctttagtaagagtatcttaattgattttaacgaatctcaatttcattgttatggcatcccctgctgcacctcgtgctgtttcctttgccgataacaatgata |
| | | taacaaatacaaacctatctcgaggtagaggacgtaatccaaaaccacgagctgcaccaaataacactgtctcttggtacactgggcttacccaacacgggaaagtccctc |
| | | ttacctttccacctgggcagggtgtacctcttaatgccaattctacccctgcgcaaaatgctgggtattggcggagacaggacagaaaaattaataccgggaatggaattaa |
| | | gcaactggctcccaggtggtacttctactacactggaactggacccgaagcagcactcccattccgggctgttaaggatggcatcgtttgggtccatgaagatggcgccac |
| | | tgatgctccttcaacttttgggacgcggaaccctaacaatgattcagctattgttacacaattcgcgcccggtactaagcttcctaaaaacttccacattgaggggactggagg |
| | | caatagtcaatcatcttcaagagcctctagcttaagcagaaactcttccagatctagttcacaaggttcaagatcaggaaactctacccgcggcacttctccaggtccatctg |
| | | gaatcggagcagtaggaggtgatctactttaccttgatcttctgaacagactacaagcccttgagtctggcaaagtaaagcaatcgcagccaaaagtaatcactaagaaag |
| | | atgctgctgctgctaaaaataagatgcgccacaagcgcacttccaccaaaagtttcaacatggtgcaagcttttggtcttcgcggaccaggagacctccagggaaactttg |
| | | gtgatcttcaattgaataaactcggcactgaggacccacgttggccccaaattgctgagcttgctcctacagccagtgcttttatgggtatgtcgcaatttaaacttacccatca |
| | | gaacaatgatgatcatggcaaccctgtgtacttccttcggtacagtggagccattaaacttgacccaaagaatcccaactacaataagtggttggagcttcttgagcaaaata |
| | | ttgatgcctacaaaaccttccctaagaaggaaaagaaacaaaaggcaccaaaagaagaatcaacagaccaaatgtctgaacctccaaaggagcagcgtgtgcaaggta |
| | | gcatcactcagcgcactcgcacccgtccaagtgttcagcctggtccaatgattgatgttaacactgattagtgtcactcaaagtaacaagatcgcggcaatcgtttgtgtttgg |
| | | caaccccatctcaccatcgcttgtccactcttgcacagaatggaatcatgttgtaattacagtgcaataaggtaattataacccatttaattgatagctatgctttattaaagtgtgt |
| | | agctgtagagagaatgttaaagactgtcacctctgcttgattgcaagtgaacagtgccccccgggaagagctctacagtgtgaaatgtaaataaaaaatagctattattcaatt |
| | | agattaggctaattagatgatttgcaaaaaaaaaaaa |
| 2410 | hCoV- | attgtgagcgatttgcgtgcgtgcatcccgcttcactgatctcttgttagatattttgtaatctaaactttataaaaacatccactccctgtaatctatgcttgtgggcgtagattttt |
| | OC43 | catagtggtgtttatattcatttctgctgttaacagattcagccagggacgtgttgtatcctaggcagtggcccgcccataggtcacaatgtcgaagatcaacaaatacggtct |
| | genome | cgaactacactgggctccagaatttccatggatgtttgaggacgcagaggagaagttggataaccctagtagttcagaggtggatatgatttgctccaccactgcgcaaaa |
| | (Genbank | gctggaaacagacggaatttgtcctgaaaatcatgtgatggtggattgtcgccgacttcttaaacaagagtgttgtgtgcagtctagcctaatacgtgaaattgttatgaatgc |
| | Accession | aagtccatatgatttggaggtgctacttcaagatgattgcagtcccgtgaagcagttttggttacaacccccttaggtatgtctttagaggcatgctatgtgagaggttgtaatc |
| | No. | ctaaaggatggaccatgggtttgtttcggcgtagaagtgtgtgtaacactggtcgttgcactgttaataagcatgtggcctatcagttatatatgattgatcctgcaggtgtctgt |
| | NC_ | cttggtgcaggtcaattcgtgggttgggtcatacccttagcctttatgcctgtgcaatcccggaaatttattgttccatgggttatgtacttgcgtaagcgtggcgaaaagggtg |
| | 006213.1) | cttacaataaagatcatggacgtggcggttttggacatgtttatgattttaaagttgaagatgcttatgaccaggtgcatgatgagcctaagggtaagttttctaagaaggcttat |
| | | gctttaattagagggtatcgtggtgttaaaccacttctctatgtagaccagtatggttgtgattatactggtagtcttgcagatggcttagaggcttatgctgataagacattgcaa |
| | | gaaatgaaggcattatttcctacttggagtcaggaactcctttttgatgtaattgtggcatggcatgttgtgcgtgatccacgttatgttatgagattgcagagtgctgctactata |
| | | cgtagtgttgcatatgttgctaatcctactgaagacttgtgtgatggttctgttgttataaaagaacctgtgcatgtttatgcagatgactctattattttacgtcaatataatttagttg |
| | | acattatgagtcatttttatatggaggcagatacagttgtaaatgctttttatggtgttgctttgaaagattgcggttttgttatgcagtttggttacattgattgcgaacaagactcgt |
| | | gtgattttaaaggttggattcctggtaacatgatagatggttttgcttgcaccacttgtggtcatgtttatgaagtaggtgatttgatggcacaatcttcaggtgttttgcctgttaac |
| | | cctgtattgcatactaagagtgcagcaggctatggtggttttggttgtaaagattcttttactctgtatggccaaactgtagtttattttggaggttgtgtgtattggagtccagcac |
| | | gtaatatatggattcctatattaaaatcctagttaagtcatatgacagtttggtttatactggagttttaggttgcaaggctattgtaaaggaaacaaatctcatttgcaaagctttg |
| | | taccttgattatgttcaacacaagtgtggcaatttacaccaacgggagttgctaggtgtttcagatgtgtggcataaacaattgctattaaatagaggtgtttataaacctctgtta |
| | | gagaatattgattattttaatatgcggcgcgctaaatttagtttagaaacttttactgtttgtgcagatggctttatgccttttcttttagatgatttagttccacgcgcatattatttggc |
| | | agtaagtggtcaagcattttgtgattatgcagataaactttgccatgccgttgtgtctaagagtaaagagttacttgatgtgtctctggattattaggtgcagctatacattatttg |
| | | aattctaagattgttgatttggctcaacattttagtgattttggaacaagtttcgtttctaaaattgttcatttattaagacttttactactagcactgctcttgcatttgcatgggttttat |
| | | ttcatgttttgcatggtgcttatatagtagtggagagtgatatatattttgttaaaaacattcctcgttatgctagtgctgttgcacaagcatttcagagtgttgctaaagttgtactg |
| | | gactctttaagagttacttttattgatggcctttcttgttttaagattggacgtagaagaatttgtctttcaggcagaaaaatttatgaagttgagcgtggcttgttacattcatccca |
| | | attgccattagatgtttatgatttaaccatgcctagtcaagttcagaaagccaagcaaaaacctatttatttaaaaggttctggttctgatttttcattagcggatagtgtagttgaa |
| | | gttgttacaacttcacttacaccatgtggttattctgaaccacctaaagttgcagctaaaatttgcattgtggataatgtttatatggccaaggctggtgacaaatattaccctgttg |
| | | tggttgatgatcatgttggactcttggatcaagcatggagagttccttgtgctggaaggcgtgttacatttaaggaacagcctacagtaaaggagattataagcatgcctaag |
| | | attattaaggttttttatgagcttgacaacgattttaatactattttaaatactgcgtgtggagtgtttgaagtggatgatactgttgatatggaggaattttatgctgtggtgattgat |
| | | gccatagaagagaaactttaccatgtaaggagcttgaaggtgtaggtgctaaagttagtgcctttttacagaaattagaggataatcccctatttttatttgatgaggctggcg |
| | | aggaagttcttgctcctaaattgtattgtgcctttacagctcctgaagatgatgactttcttgaggaaagtgatgttgaagaagatgatgtagaaggtgaggaaactgatttaac |
| | | tgtcacaagtgctggacagccttgtgttgctagtgaacaggaggagtcttctgaagtcttagaggacactttggatgatggtccaagtgtggagacatctgattcacaagttg |
| | | aagaagatgtagaaatgtcggattttgttgatcttgaatctgtgattcaggattatgaaaatgtttgttttgagttttatactacagagccagaatttgttaaagttttgggtctgtatg |
| | | tgcctaaagcaactcgcaacaattgctggttgcgatcagttttggcagtgatgcagaaattgccctgtcaatttaaagataaaaatttgcaggatctttgggtgttatacaagca |
| | | acagtatagtcagttgtttgttgataccttggttaataagatacctgctaatattgtacttccacaaggtggttatgttgctgattttgcatattggtttttaaccttatgtgattggcag |
| | | tgtgttgcatactggaaatgcattaaatgtgatttagctcttaagcttaaaggcttggatgctatgttcttttatggtgatgttgtttcacatatatgcaagtgtggtgagtctatggta |
| | | cttattgatgttgatgtgccatttacagcccactttgctcttaaagataagttgttttgtgcatttattactaagcgtattgtgtataaagcagcttgtgttgtggatgttaatgatagtc |
| | | attctatggctgttgttgatggtaaacaaattgatgatcatcgtatcactagtattactagtgataagtttgattttattattgggcatggtatgtcattttcaatgactacttttgaaatt |
| | | gcccaattgtatggttcttgtataacacctaatgtgtgttttgttaaaggtgatataattaaagtatctaagcttgttaaagcagaagttgttgtaaaccctgctaatggccatatgg |
| | | cacatggtggtggtgttgcaaaagctattgcagtagcagctggacagcagtttgttaaagagactaccgatatggttaagtctaaaggagtttgtgctactggagattgttatg |
| | | tactacagggggcaaattatgtaaaactgtgcttaatgttgttggacctgatgcgagaacacagggtaaacaaagttatgtattgttagagcgtgtttataaacatcttaacaa |
| | | ctatgactgtgttgttacaactttgatctcagctggtatatttagtgtgccttctgatgtgtctttaacatatctacttggtactgctaagaaacaagttgttcttgttagcaataatcaa |
| | | gaggattttgatcttatttctaagtgtcagataactgctgttgagggcactaagaaattggcagcgcgtctttatttaatgttggacgttccattgtttacgaaacagatgctaata |
| | | agttgattttaatcaatgacgttgcatttgtttcgacatttaatgttttacaggatgttttatccttaagacatgatatagcacttgatgatgatgcacgaaccttcgttcagagcaat |
| | | gttgatgttgtacctgagggttggcgtgttgtcaataagttttatcaaattaatggtgttagaaccgttaagtattttgagtgtactggaggcatagatatatgcagccaggataa |
| | | agtttttggttatgtacagcagggtatttttaataaggctactgttgctcaaattaaagccttgtttttggataaagtggacatcttgctaactgttgatggtgttaatttcactaatag |
| | | gtttgtgcctgttggtgaaagttttggtaagagtctaggaaatgtgttttgtgatggagttaatgtcacgaagcataagtgtgatataaattataaaggtaaagtctttttccagttt |
| | | gataatctttctagtgaagatttaaaggctgtaagaagttcctttaattttgatcagaaggaattgcttgcctattacaacatgcttgttaattgttttaagtggcaggttgttgttaat |
| | | ggtaagtatttcacttttaagcaagctaataacaattgttttgttaatgtttcttgcttaatgctccagagtttgcatctgacatttaaaattgttcaatggcaagaggcatggcttga |
| | | atttcgttctggccgccctgctagatttgtagctttggttttggccaaaggtgggtttaaatttggagatcctgctgattctagagatttcttgcgtgttgtgtttagtcaagttgattt |
| | | gactggggcaatatgtgattttgaaattgcatgtaaatgtggtgtaaagcaggaacagcgtactggtaggacgctgttatgcattttggtacattgagtcgtgaagatcttga |
| | | gattggttataccgtggactgttcttgcggtaaaaagctaattcattgtgtacgatttgatgtaccatttttaatttgcagtaatacacctgctagtgtaaaattacctaagggtgta |
| | | ggaagtgcaaatatttttataggtgataaggttggtcattatgttcatgttaagtgtgaacaatcttatcagctttatgatgcttctaatgttaagaaggttacagatgttactggca |
| | | agttgtcagattgtctgtatcttaaaaatttgaaacaaacttttaaatcggtgttaaccacctattatttggatgatgttaagaaaattgagtataaacctgacttgtcacaatattatt |
| | | gtgacggaggtaagtattatactcagcgtattattaaagcccaatttaaaacattcgagaaagtagatggtgtgtatactaattttaaattgataggacacaccgtagtgacag |
| | | tcttaatgctaagttgggttttgatagctctaaagagtttgttgaatataagattactgagtggccaacagctacaggtgatgtggtgttggctactgatgatttgtatgttaagag |
| | | atatgagaggggttgtattacttttggtaaacctgttatatggttaagccatgagaaagcttccctcaattattaacatattttaatagaccttcattggttgatgataataaatttga |
| | | tgttttaaaagtggatgatgttgacgatggtggtgacagctcagagagtggtgccaaagaaaccaaagaaatcaacattattaagttaagtggtgttaaaaaaccatttaagg |
| | | ttgaagatagtgtcattgttaatgatgatactagtgaaaccaaatatgttaagagtttgtctattgttgatgtgtatgatatgtggcttacaggttgtaagtatgttgttagaactgct |
| | | aatgattgagcagagcagttaacgtacctacaatacgtaagtttataaaatttggtatgactcttgttagtataccaattgatttgttaaatttaagagagattaagcctgctgtta |
| | | atgtggttaaagagtgcgaaataaaatttctgtatgattaatt-ttattaaatggctttttgtcttattatttggctggattaaaatatccgctgataataaagtaatctacaccacag |
| | | aaattgcatcaaagcttacgtgtaagcttgtagctttagcttttaaaaatgcatttttgacatttaagtggagtatggttgctagaggtgcttgcattatagcgactatatttctattgt |
| | | ggtttaattttatatatgccaatgtaatttttagtgatttttatttgcctaaaatcggtttcttgccgacttttgttggtaagattgcacagtggattaagaacacttttagtcttgtaacta |
| | | tttgtgatctatattccattcaggatgtgggttttaagaatcagtattgtaatggaagtattgcatgtcagttctgcttggcaggatttgatatgttagataattataaagccattgat |
| | | gtagtacagtatgaagctgataggagagcatttgttgattatacaggtgtgttaaagattgtcattgaattgatagttagttacgccctgtatacggcatggttttatccattgtttg |
| | | cccttatcagtattcagatcttgaccacttggctgcctgagctttttatgcttagtacattacattggagttttaggttgctggtggctttagctaatatgttaccagcacatgtgttta |
| | | tgaggttttatattattattgcctcttttattaagctctttagcttgtttaggcatgttgcctatggttgtagtaaatctggttgtttgttttgttacaagaggaatcgtagtctacgtgtta |
| | | aatgtagtactatcgttggtggcatgatacgctattacgatgttatggctaatggtggcactggcttttgttcaaaacatcaatggaattgcattgattgtgattcttataaaccag |
| | | gtaatacttttattactgttgaggccgctcttgatctatctaaggaattgaaacggcccattcagcctacagatgttgcttatcatacggttactgatgttaagcaagttggttgttc |
| | | tatgcgcttgttctatgatcgtgatggacagcgcacatatgatgatgttaatgctagtttgtttgtggattatagtaatttgctacattctaaggttaagagtgtgcctaatatgcatg |
| | | ttgtggtagtggaaaatgatgctgataaagccaattttctgaatgctgctgtattttatgcacagtctttgtttagacctattttaatggttgataaaaatctgataactactgctaac |
| | | actggtacgtctgttacagaaactatgtttgatgtttatgtggatacatttttgtctatgtttgatgtggataaaaagagtcttaatgattaatagcaactgcgcattatctataaaa |
| | | cagggtacgcagatttataaagttttggatacctttttaagctgtgctcgtaaaagttgttctattgattcagatgttgatactaagtgtttagctgattctgtcatgtctgctgtatcg |
| | | gcaggtcttgaattgacggatgaaagttgtaataacttggtgccaacatatttgaagagtgacaacattgtggcagctgatttaggtgttctgattcaaaattctgcaaagcatg |
| | | tgcagggtaatgttgctaaaatagctggtgtttcctgtatatggtctgtggatgcttttaatcagtttagttctgatttccagcataaattgaagaaagcatgttgtaaaactggtttg |
| | | aaactgaagcttacttataataagcagatggctaatgtctctgttttaactacaccattagtcttaaagggggtgcagtttttagttattttgtttatgtgtgttttgtgttgagtttggt |
| | | ctgttttattggactgtggtgcttaatgcccacttacacagtacacaaatcagattttcagcttcccgtttatgccagttataaagttttagataatggtgttattagagatgttagcg |
| | | ttgaagatgtttgtttcgctaacaaatttgaacaatttgatcaatggtatgagtctacatttggtctaagttattatagtaacagtatggcttgtcccattgttgttgctgtaatagatc |
| | | aggattttggctctacagtgtttaatgtccctaccaaagtgttacgatatggttatcatgtgttgcactttattacacatgcactttctgctgatggagtgcagtgttatacgccaca |
| | | tagtcaaatatcgtattctaatttttatgctagtggctgtgtgattcctctgcttgcactatgtttacaatggccgatggtagtccacaaccttattgttatacagaggggcttatgc |
| | | aaaatgcttactgtatagttcattggtacctcacgtgcggtataatcttgctaatgctaaaggttttatccgttttccagaagtgttgcgagaagggcttgtacgtatcgtgcgta |
| | | ctcgttctatgtcgtattgcagagttggattatgtgaggaagctgatgagggtatatgattaattttaatggttcttgggtgcttaataatgattattatagatcattgcctgggacc |
| | | ttttgtggtagagatgtttttgatttaatttatcagctatttaaaggtttagcacagcctgtggattttttggcattgactgctagttccattgctggtgctatactcgctgtaattgttgt |
| | | tttggtgttttattacctaataaagcttaaacgtgatttggtgattacaccagtgttgtttttgttaacgtgattgtgtggtgtgtaaattttatgatgctttttgtgtttcaagtttacccc |
| | | atactttcttgtgtatatgctatttgttatttttatgccacgattatttcccttcggagataagtgtgataatgcacttacaatggctagttatgtatggcactattatgcctttatggtttt |
| | | gtttgctatatatagctgttgttgtttcaaatcatgctttttgggtattttcttactgcagaaagcttggtacttctgttcgtagtgatggtacatttgaagaaatggctctcactactttt |
| | | atgattacaaaagattcttattgtaagcttaagaattctttgtctgatgttgatttaatagatatttgagtttgtataataaatataggtattacagcggtaaaatggatactgctgcat |
| | | atagggaggctgcttgctctcagttggctaaagcaatggacacatttaccaataataatggtagtgatgtgctttaccaaccgcctactgcttccgtctcaacttcattcttgcaa |
| | | tctggtattgtgaaaatggtaaatcctacttctaaggtagaaccatgtgttgtcagtgttacctatggtaatatgacattgaatggtttatggttggatgacaaggtctactgtccc |
| | | agacatgtaatatgttctgcttcagatatgactaatccagattatacaaatttgttgtgtagagtaacatcaagtgattttactgtattgtttgatcgtctaagccttacagtgatgtct |
| | | tatcaaatgcggggttgtatgcttgttcttacagtgaccdgcaaaattctcgtacgccaaaatatacatttggtgtggttaaacctggtgagacttttactgttttagctgcttata |
| | | acggcaaaccacaaggagcctttcatgtaactatgcgtagtagttataccattaagggttcctttttatgcggatcttgtggatctgttggttatgtaataatgggtgattgtgtta |
| | | aatttgtttatatgcatcaattggagcttagtactggttgtcatactggtactgacttcaatggggatttttatggtccttataaggatgctcaggttgttcagttgctcattcaggatt |
| | | atatacaatctgttaattttgtagcatggctttatgctgctatacttaacaattgtaattggtttgtacaaagtgataagtgttctgtagaagattttaatgtgtgggctctgtccaatg |
| | | gatttagccaagttaaatctgaccttgttatagatgctttagcttctatgactggtgtgtctttggaaacactgttggctgctattaagcgtcttaagaatggtttccaaggacgtca |
| | | gattatgggtagttgctcttttgaggatgaattgacacctagcgatgtttatcaacaactcgctggtatcaagttacaatcaaaacgcactagattgtttaaaggcactgtttgttg |
| | | gattatggcttctacatttttgtttagttgcataattacagcatttgtgaaatggactatgtttatgtatgtaactactaatatgtttagtattacgttttgtgcactttgtgttataagtttg |
| | | gccatgttgttggttaagcataagcatctttatttgactatgtatataactcctgtgctttttacactgttgtataacaactatttggttgtgtacaagcatacatttagaggctatgtct |
| | | atgcatggctatcatattatgttccatcagttgagtacacttatactgatgaagttatttatggcatgttattgcttgtaggaatggtattgttacattacgtagcattaaccatgattt |
| | | gttttcttttataatgtttgttggtcgtttgatttctgttttctctttgtggtacaagggttctaacttagaggaagaaattcttcttatgttggcttccctttttggtacttacacatggaca |
| | | acagttttatctatggctgtagcaaaggttattgctaagtgggttgctgtgaatgtcttgtatttcacagatatacctcaaattaagatagtgatttgtgctatttgtttattggttatat |
| | | tattagctgttattggggcttgttttccttgatgaacagtttgtttagaatgcctttgggtgtttataattataaaatttcagtacaggaattaagatatatgaatgctaatggattgcg |
| | | ccctcctaagaatagttttgaagcccttatgcttaattttaagagttgggtattggaggtgttccaatcattgaagtatctcaatttcaatcaaaattgactgatgtcaaatgtgcta |
| | | atgtcgtcttgcttaattgcttgcaacatttgcatgttgcttctaattctaagttgtggcattattgtagcactttgcacaatgaaatacttgccacttcggatctgagtgttgatttga |
| | | aaagcttgctcagttattaattgttttgtttgctaatccagctgctgtggatagcaagtgcctgactagtattgaagaagtttgcgatgattacgcaaaggacaatactgttttgca |
| | | ggctttacagagtgaatttgttaatatggctagcttcgttgaatatgaagttgctaagaaaaatcttgatgaggcgcgttttagtggttctgctaatcaacagcagttaaaacagc |
| | | tagagaaagcctgtaatattgctaaatctgcttatgaacgcgaccgtgctgtagcaaaaaagttggagcgtatggctgatttggctctcactaatatgtataaagaagctagaa |
| | | ttaatgataagaagagtaaggttgtttctgccttgcaaactatgctttttagtatggtgcgtaagttagataatcaagctctgaattcaatattagataacgctgtgaagggttgtgt |
| | | accattgaatgcaataccttcattggcagcaaatactctgaatataattgtaccagataaaagtgtttatgaccaggtagttgataatgtctatgttacctatgcgggtaatgtatg |
| | | gcagattcaaactatccaggattcagatggtacaaataagcagttgaatgagatatctgatgattgtaactggccactagttattattgcaaatcggtataatgaggtatctgct |
| | | actgttttgcaaaataatgaattaatgcctgctaagttgaaaattcaggttgttaatagtggtccagatcagacttgtaatacacctactcaatgttactataataatagtaacaatg |
| | | ggaagattgtttatgctatacttagtgatgttgatggtcttaagtatacaaaaattcttaaagatgatggcaattttgttgttttggagttagatcctccttgtaaatttactgttcaaga |
| | | tgctaaaggtcttaaaattaagtacctttattttgtaaaaggttgtaacacactagcaagaggctgggttgttggtacaatttcttctacagttagattgcaagctggaactgctac |
| | | tgaatatgcttccaactcatctatattgtattatgtgcgttttctgtagatcctaagaaaacgtatttagattttatacaacaaggaggaacacctattgccaattgtgttaaaatgtt |
| | | gtgtgaccatgctggtaccggtatggccattactgttaaacccgatgctaccactagtcaggattcatatggtggtgcgtctgtttgtatatattgccgcgcacgagttgaaca |
| | | cccagatgttgatgggttgtgcaaattacgcggcaagtttgtacaagtgcctgtaggtataaaagatcctgtgtcttatgttttgacacatgatgtttgtcgagtttgtggattttg |
| | | gcgggatggaagttgttcatgtgttagcactgacactactgttcaatcaaaagatactaattttttaaacgggttcggggtacgagtgtagatgcccgtctcgtaccctgcgcc |
| | | agtggtttatctactgatgtacaattaagggcatttgatatttacaatgctagtgttgctggcattggtttacatttaaaagttaattgttgccgttttcagcgtgttgatgagaacgg |
| | | tgataaattagatcagttattgttgttaagaggacagatctgactatatataatagagagatgaaatgctatgagcgtgtaaaagattgtaagtttgtggctgaacacgatttctt |
| | | tacatttgatgtagaaggtagtcgtgtgccacacattgtacgcaaggatttaacaaagtatactatgttggatctttgctatgcattgcgacattttgatcgcaatgattgcatgct |
| | | gctttgtgacattctctctatatatgctggttgtgaacaatcctactttactaagaaggattggtatgattttgttgaaaatcctgatattattaatgtgtataaaaagctaggacctat |
| | | ttttaatagagccctagttagcgctactgagtttgcggacaaattggtggaggtaggcttagtaggcgttttaacacttgataatcaagatttaaatggtaaatggtatgattttg |
| | | gtgactatgttattgcagccccaggatgtggtgttgctatagcagattcttattattcttatatcatgcctatgctgaccatgtgtcatgcattggattgcgaattgtatgtgaataat |
| | | gcttatagactatttgatcttgtacagtatgattttactgattacaagcttgaattgtttaataagtattttaagcactggagtatgccatatcatcctaacactgttgattgtcaggat |
| | | gatcggtgtattatacattgtgctaattttaacatactttttagtatggttttacctaatacatgttttgggcctcttgttaggcaaatttttgtggatggtgtgccttttgttgtttcaattg |
| | | gctaccattataaagaacttggtattgtgatgaatatggatgtggatacacatcgttatcgcttgtctttaaaagacttgatttatatgctgctgatccagctttgcatgtagcttct |
| | | gctagtgcattgtatgatttacgcacttgctgttttagtgttgccgctataacaagcggtgtaaaatttcaaacagttaaacctggtaattttaatcaggatttttatgattttgttttaa |
| | | gtaaaggcctgcttaaagagggtagctcagttgatctgaagcactttttattacacaggatggtaatgctgctattactgattataattattataagtataatttgcccaccatggt |
| | | ggacattaagcagttgttgtttgttttggaagttgtttataagtattttgagatttatgatggtgggtgtataccggcatcacaagtcattgttaataattatgataagagtgctggct |
| | | atccatttaacaaatttggaaaagccaggctctattatgaagcattatcatttgaggaacaggatgaaatttacgcttatactaagcgtaatgtcctgccaacacttactcaaatg |
| | | aatttgaaatatgctattagtgctaagaatagagcccgcactgttgctggtgtttccatacttagtactatgactggcagaatgtttcatcaaaaatgtttgaaaagtatagcagct |
| | | acacgtggtgttcctgtagttataggcaccactaaattttatggtggctgggatgatatgttacgccgccttattaaagatgttgacaatcctgtacttatgggttgggattatcct |
| | | aagtgtgatcgtgctatgccaaacctactacgtattgttagtagtttggtattagcccgaaaacatgagacatgttgttcgcaaagcgataggttttatcgacttgcgaatgaat |
| | | gcgcacaagttttgagtgaaattgttatgtgtggtggctgttattatgttaagcctggtggcactagtagtggtgatgcaactactgcttttgctaattcagtctttaacatatgtca |
| | | agagtttcagccaatgtatgtgccttaatgtcatgcaatggcaataagattgaagatcttagtatacgtgctcttcagaagcgcttatactcacatgtgtatagaagtgataagg |
| | | ttgattcaacctttgtcacagaatattatgaatttttaaataagcattttagtatgatgattttgagtgatgatggggttgtgtgttataattctgattatgcgtccaaagggtatattgc |
| | | taatataagtgcctttcaacaggtattatattatcaaaataacgtttttatgtcagaatccaaatgttgggttgaacatgacataaataatggacctcatgaattctgttcacaacac |
| | | acaatgcttgtaaagatggatggtgacgatgtctaccttccatatcctaatcctagtcgtatattaggagaggatgttttgtagatgatttgttaaagactgatagtgttcttttaat |
| | | agaacgatttgtaagtcttgcaatagatgcttatccacttgtgtatcatgaaaatgaagaataccaaaaggtttttcgtgtttatttggcgtatataaagaagttgtacaatgacct |
| | | gggtaatcagatcttggatagctacagtgttattttaagtacttgtgatggacaaaagttcactgatgagtccttttacaagaacatgtatttaagaagtgcagttatgcagagtg |
| | | ttggagcttgcgtggtctgctcttctcaaacatcattacgttgtggcagttgcatcagaaagcctcttctttgctgcaagtgttgttatgatcatgttatggcgactgatcataaata |
| | | tgtcttgagtgtttcaccatatgtgtgtaatgcaccaggatgtgatgtaaatgatgttaccaaattgtatctaggtggtatgtcatattattgtgaagaccataagccacaatattca |
| | | ttcaagttggtaatgaatggtaggtttttggtctatataaacaatcttgtacaggatctccgtacatagacgattttaatcgtatagctagttgtaaatggaccgatgtggatgatt |
| | | acatactagctaatgaatgtacagagcgcttgaaattgtttgctgcagaaacgcaaaaggcaaccgaggaagcctttaagcagagttatgcatcagcaacaatacaagaga |
| | | ttgttagtgagcgcgaattgattctctcttgggagattggaaaagttaagccaccacttaataaaaattatgtttttactggctaccattttactaaaaatggtaagacagttttagg |
| | | tgagtatgtttttgataagagtgagttgactaatggtgtgtattatcgcgccacaaccacttataagctatctgtaggagatgtttttgttttaacctctcattcagtagctaatttaa |
| | | gtgctcctacgcttgttccgcaggagaattatagtagtattagatttgctagtgtttatagtgtgcttgagacgtttcagaacaatgttgttaattatcaacacattggtatgaaacg |
| | | ttactgcaccgtgcaaggacctcctggtacagggaagtcacatcttgctattggtcttgctgtattctattgtacagcacgtgttgtatacacagcggccagccatgcagctgtt |
| | | gacgcattgtgtgaaaaagcatataaatttttgaatataaatgattgcactcgtattgttccggccaaggtcagggtggagtgctatgataagtttaaaattaatgacaccactc |
| | | gtaagtatgtgtttactaccataaatgcattacctgagatggtgactgatattgttgttgtagatgaagttagtatgcttaccaattatgagctttctgttattaatgctcgtattcgcg |
| | | ctaagcattatgtttatattggtgatcctgctcaattgccagcaccacgtgtgttattgagcaagggtacacttgaacctaaatattttaacactgttactaagctcatgtgttgctt |
| | | agggccagacatttttcttggtacatgttatagatgtcctaaggaaatcgttgatacagtgtccgccttggtttatgaaaataagcttaaggctaagaatgagagtagttcattgt |
| | | gttttaaggtctattataagggcgttacaacacatgaaagttctagtgctgtaaatatgcagcagatttatttgattaataagtttttgaaggctaaccattgtggcataaagctgt |
| | | ttttattagcccatataatagtcagaactttgcagctaagcgtgttttgggtttacaaacccaaaccgtggattctgctcaaggttctgaatatgattatgttatatattcacagact |
| | | gcagaaacagcgcattctgtaaatgttaatcgcttcaatgttgctattactcgagccaagaaaggtattctttgtgttatgagtaatatgcagttgtttgaagcattacagtttacta |
| | | cattgaccttagataaagtgccacaggccgtcgaaactaaagttcaatgtagtactaatttatttaaagattgtagcaagagttatagcggttatcacccagctcatgctccttca |
| | | tttttggcagtagatgacaaatataaggcaactggcgatttagccgtgtgtcttggtattggtgattctgctgttacatattcaagattaatatcactcatgggttttaaattggatgt |
| | | tacccttgatgggtattgtaagctttttataactaaagaagaagagttaaacgcgtgcgtgcctgggttggctttgatgctgaaggtgctcatgccacgcgtgatagcattgg |
| | | gacaaatttcccacttcaattaggattttccacaggaattgattttgttgtggaagccactggtttgtttgctgatagagatggttacagctttaaaaaggctgtggcgaaagctc |
| | | ctcctggtgaacaatttaagcacctcatccattgatgacgagaggtcatcgctgggatgttgttagacctagaatagtacaaatgtttgcagatcatttaattgatctgtctgatt |
| | | gtgttgtgctagttacatgggcagccaactttgagctcacttgtaccgctactttgcaaaagtagggcgtgagatttcttgtaatgtatgcactaaacgtgccacagtttacaat |
| | | tctagaactggttactatggttgttggcgccatagtgttacatgtgattacttgtataatccacttattgttgatattcaacagtggggatatattggttattatcaagtaatcatgatt |
| | | tatattgtagtgtccataaaggagcacatgttgcttcctctgatgctataatgacacggtgtttggccgtttatgattgatttgcaataatattaattggaatgtggagtatcccatc |
| | | atttcaaatgagttaagtattaatacctcttgtagggtcttgcagcgtgtgattcttaaagctgccatgctctgcaacagatatactttgtgttatgatattggcaacccaaaagcg |
| | | attgcctgtgtcaaagattttgattttaagttctatgatgcccaaccaattgttaagtctgttaagactcttttgtattatttgaggcacataaggactcttttaaagacggtttgtgta |
| | | tgttttggaactgtaatgtggataagtatccaccgaatgcagttgtatgtagatttgacactagagtgttgaataatttaaatcttcctggctgtaatggaggtagtttgtatgttaat |
| | | aaacatgcattccacactaaaccattgctagggcagcctttgagcatttgaagcctatgccattcttctattattcagatacgccttgtgtgtatatggatggcatggatgctaa |
| | | gcaggttgattatgtacctttgaaatctgccacgtgcatcacaagatgcaatttaggtggtgcagtttgtttaaaacatgctgaagagtatcgtgagtacttagagtcttacaata |
| | | cagctactacagcaggttttactttttgggtctataagacatttgatttttataatttgtggaatacgttcaccaagctacaaagcttggagaatgttgtatataatttagtcaagact |
| | | ggtcattatacaggacaggctggtgaaatgccttgtgccattataaatgataaagttgtggctaagatcgataaggaggatgttgtcatttttattaataatacaacataccctac |
| | | taatgtggccgttgaattatttgccaagcgcagtgttcgacaccacccagagcttaagctctttagaaatttaaatatagacgtgtgttggaagcacgtcatttgggattatgct |
| | | agagaaagtatattttgcagtaatacctatggtgtctgcatgtatacagatttaaagttcattgataaattgaatgtcctttttgatggtcgtgataatggtgctcttgaagcttttaa |
| | | acgttctaataatggcgtttacatttccacgacaaaagttaagagtctttcgatgataagaggtccaccgcgtgctgaattaaatggcgtagtggtggacaaggttggagaca |
| | | ctgattgtgtgttttattttgctgtgcgtaaagaaggtcaggatgtcatcttcagccaattcgacagcctgggagtcagctctaaccagagcccacaaggtaatctggggagt |
| | | aatggtaaacccggtaatgtcggtggtaatgatgactgtcaatctctactatctttacacaaagccgtgttattagctcttttacatgtcgtactgatatggaaaaagattttatag |
| | | ctttagatcaagatgtgtttattcagaagtatggtttggaggactatgcctttgaacacattgtttatggtaacttcaaccagaagattattggtggtttgcatttgttaataggcttg |
| | | taccgaagacagcaaacttccaatctggttgttcaggagtttgtttcatatgactccagcatacactcttattttatcactgacgagaagagtggtggtagtaagagtgtttgcac |
| | | tgttatagatattttgttggatgattttgtggctcttgttaagtcacttaatcttaattgtgtgagtaaggttgttaatgttaatgttgattttaaagattttcagtttatgattggtgtaac |
| | | gatgagaaagttatgactttctatcctcgtttgcaagctgcatctgactggaagcctggttattctatgcctgtattatataagtatttgaattctccaatggaaagagttagtctct |
| | | ggaattatgggaagccagttactttgcctacaggctgtatgatgaatgttgctaagtatactcagttatgtcaatatctgaatactacaacattagctgtacctgttaatatgcga |
| | | gttttgcatttaggtgcaggttcagaaaaaggagtagcaccgggttctgcagttcttaggcagtggttgcctgctggtactattcttgtagataacgatttatacccatttgttagt |
| | | gacagtgtcgctacatattttggggattgtataactttaccattgattgtcaatgggatttgataatttctgatatgtatgaccctattactaagaacataggggagtacaatgtga |
| | | gtaaagatggtttctttacatacatttgtcatatgattcgagacaagttagctctgggtggcagtgttgctataaaaataacagagttttcttggaatgcagaattatataagttaat |
| | | ggggtattttgcattttggactgtgttttgcacaaatgcaaatgcttcttctagtgaaggatttttaattggcataaattatttgtgtaagcccaaggttgagatagatggaaatgtta |
| | | tgcatgccaattatttgttttggagaaattccacagtttggaacgggggtgcttatagcctgtttgatatggctaaattcccgcttaagttggctggtactgccgtaataaatttaa |
| | | gagcagaccagattaatgatatggtttattcccttcttgaaaagggtaaactacttattagagatacaaataaagaagt-tttcgttggtgacagtttggttaatgtaatctaaacttt |
| | | aaaaatggctgtcgcttatgcagacaagcctaatcattttatcaattttccacttacccattttcagggttttgtgttaaattataaaggtttacaatttcaaattctcgatgaaggagt |
| | | ggattgtaaaatacaaacagcgccacacattagtcttactatgctggacatacagcctgaagactataaaagtgttgatgtcgctattcaagaagttattgatgatatgcattgg |
| | | ggtgatggttttcagattaaatttgagaatcctcacatcctaggaagatgcatagttttagatgttaaaggtgtagaagaattgcatgacgatttagttaattacattcgtgataaa |
| | | ggttgtgttgctgaccaatccaggaaatggattggccattgcaccatagctcaactcacggatgcagcactgtccattaaggaaaatgttgattttataaacagcatgcaattc |
| | | aattataaaatcaccatcaacccctcatcaccggctagacttgaaatagttaagctcggtgctgaaaagaaagatggtttttatgaaaccatagttagtcactggatgggaatt |
| | | cgttttgaatacacatcacccactgataagctagctatgattatgggttattgttgtttagatgtggtacgtaaagagctagaagaaggcgatcttcccgagaatgatgatgatg |
| | | cttggtttaagctatcgtaccattatgaaaacaattcttggttcttccgacatgtctacaggaaaagttttcatttccgtaaggcttgtcaaaatttagattgtaattgtttggggtttt |
| | | atgaatcttcagttgaagaatattaaactcagtgaaaatgtttttgcttcctagatttattctagttagctgcataattggtagcttaggtttttacaaccctcctaccaatgttgtttcg |
| | | catgtaaatggagattggtttttatttggtgacagtcgttcagattgtaatcatattgttaatatcaacccccataattattcttatatggaccttaatcctgttctgtgtgattctggta |
| | | aaatatcatctaaagctggcaactccatttttaggagttttcactttaccgatttttataattacacaggcgaaggtcaacaaattattttttatgagggtgttaattttacgccttatc |
| | | atgcctttaaatgcaaccgttctggtagtaatgatatttggatgcagaataaaggcttgttttatactcaggtttataagaatatggctgtgtatcgcagccttacttttgttaatgta |
| | | ccatatgtttataatggctccgcacaagctacagctctttgtaaatctggtagtttagtccttaataaccctgcatatatagctcctcaagctaactctggggattattattataagg |
| | | ttgaagctgatttttatttgtcaggttgtgacgagtatatcgtaccactttgtatttttaacggcaagtttttgtcgaatacaaagtattatgatgatagtcaatattattttaataaaga |
| | | cactggtgttatttatggtctcaattctacagaaaccattaccactggttttgatcttaattgttattatttagttttaccctctggtaattatttagccatttcaaatgagctattgttaac |
| | | tgttcctacgaaagcaatctgtcttaataagcgtaaggattttacgcctgtacaggttgttgattcgcggtggaacaatgccaggcagtctgataacatgacggcggttgcttg |
| | | tcaacctccgtactgttattttcgtaattctactaccaactatgttggtgtttatgatattaatcatggagatgctggttttactagcatacttagtggtttgttatataattcaccttgttt |
| | | ttcgcagcaaggcgtttttaggtatgataatgttagcagtgtctggcctctctacccctatggcagatgtcccactgctgctgatattaatatccctgatttacccatttgtgtgtat |
| | | gatccgctaccagttattttgcttggcattcttttgggcgttgcgattgtaattattgtagttttgttgttatattttatggtggataatgttactaggctgcatgatgcttagaccataat |
| | | ctaaacatgtttttgatacttttaatttccttaccaacggcttttgctgttataggagatttaaagtgtacttcagataatattaatgataaagacaccggtcctcctcctataagtact |
| | | gatactgttgatgttactaatggtttgggtacttattatgttttagatcgtgtgtatttaaatactacgttgtttcttaatggttattaccctacttcaggttccacatatcgtaatatggc |
| | | actgaagggaagtgtactattgagcagactatggtttaaaccaccatttattctgattttattaatggtatttttgctaaggtcaaaaataccaaggttattaaagatcgtgtaatgt |
| | | atagtgagttccctgctataactataggtagtacttttgtaaatacatcctatagtgtggtagtacaaccacgtacaatcaattcaacacaggatggtgataataaattacaaggt |
| | | cttttagaggtctctgtttgccagtataatatgtgcgagtacccacaaacgatttgtcatcctaacctgggtaatcatcgcaaagaactatggcatttggatacaggtgttgtttc |
| | | ctgtttatataagcgtaatttcacatatgatgtgaatgctgattatttgtattttcatttttatcaagaaggtggtactttttatgcatattttacagacactggtgttgttactaagtttttg |
| | | tttaatgtttatttaggcatggcgctttcacactattatgtcatgcctctgacttgtaatagtaagcttactttagaatattgggttacacctdcacttctagacaatatttactcgcttt |
| | | caatcaagatggtattatttttaatgctgttgattgtatgagtgattttatgagtgagattaagtgtaaaacacaatctatagcaccacctactggtgtttatgaattaaacggttaca |
| | | ctgttcagccaatcgcagatgtttaccgacgtaaacctaatcttcccaattgcaatatagaagcttggcttaatgataagtcggtgccctctccattaaattgggaacgtaagac |
| | | attttcaaattgtaattttaatatgagcagcctgatgtcttttattcaggcagactcatttacttgtaataatattgatgctgctaagatatatggtatgtgtttttccagcataactatag |
| | | ataagtttgctatacccaatggcaggaaggttgacctacaattgggtaatttgggctatttgcagtcatttaactatagaattgatactactgcaacaagttgtcagttgtattata |
| | | atttacctgctgctaatgtttctgttagcaggtttaatccttctacttggaataagagatttggttttatagaagattctgtttttaagcctcgacctgcaggtgttcttactaatcatga |
| | | tgtagtttatgcacaacactgtttcaaagctcctaaaaatttctgtccgtgtaaattgaatggttcgtgtgtaggtagtggtcctggtaaaaataatggtataggcacttgtcctgc |
| | | aggtactaattatttaacttgtgataatttgtgcactcctgatcctattacatttacaggtacttataagtgcccccaaactaaatctttagttggcataggtgagcactgttcgggt |
| | | cttgctgttaaaagtgattattgtggaggcaattcttgtacttgccgaccacaagcatttttgggttggtctgcagactcttgtttacaaggagacaagtgtaatatttttgctaattt |
| | | tattttgcatgatgttaatagtggtcttacttgttctactgatttacaaaaagctaacacagacataattcttggtgtttgtgttaattatgacctctatggtattttaggccaaggcatt |
| | | tttgttgaggttaatgcgacttattataatagttggcagaaccttttatatgattctaatggtaatctctacggttttagagactacataacaaacagaacttttatgattcgtagttgc |
| | | tatagcggtcgtgtttctgcggcctttcacgctaactcttccgaaccagcattgctatttcggaatattaaatgcaactacgtttttaataatagtcttacacgacagctgcaaccc |
| | | attaactattttgatagttatcttggttgtgttgtcaatgcttataatagtactgctatttctgttcaaacatgtgatctcacagtaggtagtggttactgtgtggattactctaaaaaca |
| | | gacgaagtcgtggagcgattaccactggttatcggtttactaattttgagccatttactgttaattcagtaaacgatagtttagaacctgtaggtggtttgtatgaaattcaaatac |
| | | cttcagagtttactataggtaatatggtggagtttattcaaacaagctctcctaaagttactattgattgtgctgcatttgtctgtggtgattatgcagcatgtaaatcacagttggtt |
| | | gaatatggtagtttctgtgataacattaatgccatactcacagaagtaaatgaactacttgacactacacagttgcaagtagctaatagtttaatgaatggtgttactcttagcact |
| | | aagcttaaagatggcgttaatttcaatgtagacgacatcaatttttcccctgtattaggttgtctaggcagcgaatgtagtaaagcttccagtagatctgctatagaggatttactt |
| | | tttgataaagtaaagttatctgatgtcggttttgttgaggcttataataattgtacaggaggtgccgaaattagggacctcatttgtgtgcaaagttataaaggcatcaaagtgttg |
| | | cctccactgctctcagaaaatcagatcagtggatacactttggctgccacctctgctagtctatttcctccttggacagcagcagcaggtgtaccattttatttaaatgttcagtat |
| | | cgcattaatgggcttggtgtcaccatggatgtgctaagtcaaaatcaaaagcttattgctaatgcatttaacaatgccctttatgctattcaggaagggttcgatgcaactaattc |
| | | tgattagttaaaattcaagctgttgttaatgcaaatgctgaagctcttaataacttattgcaacaactctctaatagatttggtgctataagtgcttctttacaagaaattctatctag |
| | | acttgatgctcttgaagcggaagctcagatagatagacttattaatggtcgtcttaccgctcttaatgcttatgtttctcaacagcttagtgattctacactggtaaaatttagtgca |
| | | gcacaagctatggagaaggttaatgaatgtgtcaaaagccaatcatctaggataaatttctgtggtaatggtaatcatattatatcattagtgcagaatgctccatatggtttgta |
| | | ttttatccactttagttatgtccctactaagtatgtcacagcgagggttagtcctggtctgtgcattgctggtgatagaggtatagctcctaagagtggttattttgttaatgtaaata |
| | | atacttggatgtacactggtagtggttactactaccctgaacctataactgaaaataatgttgttgttatgagtacctgcgctgttaattatactaaagcgccgtatgtaatgctga |
| | | acacttcaatacccaaccttcctgattttaaggaagagttggatcaatggtttaaaaatcaaacatcagtggcaccagatttgtcacttgattatataaatgttacattcttggacc |
| | | tacaagttgaaatgaataggttacaggaggcaataaaagtcttaaatcagagctacatcaatctcaaggacattggtacatatgaatattatgtaaaatggccttggtatgtatg |
| | | gatttaatctgccttgctggtgtagctatgcttgttttactattcttcatatgctgttgtacaggatgtgggactagttgttttaagaaatgtggtggttgttgtgatgattatactgga |
| | | taccaggagttagtaatcaaaacttcacatgacgactaagttcgtattgattcattgcactgatacttgttagatattttgcaatctagcatttgttaaagttcttaaggccacgc |
| | | cctattaatggacatttggagacctgagaagaaatatctccgttatattaacggttttaatgtctcagaattagaagatgcttgttttaaatttaactatcaatttcctaaagtaggat |
| | | attgtagagttcctagtcatgcttggtgccgtaatcaaggtagattttgtgctacattcactattatggtaaatccaaacattatgataaatattttggagtaataaatggtttcaca |
| | | gcattcgctaatactgtagaggatgctgttaacaaactggttttcttagctgttgactttattacctggcgcagacaggagttaaatgtttatggctgatgcttatcttgcagacac |
| | | tgtgtggtatgtggggcaaataatttttatagttgccatttgtttattggttacaatagttgtagtggcatttttggcaacttttaaattgtgtattcaactttgcggtatgtgtaatacct |
| | | tagtactgtccccttctatttatgtgtttaatagaggtaggcagttttatgagttttacaatgatgtaaaaccaccagtccttgatgtggatgacgtttaggtaatccaaacattatg |
| | | agtagtaaaactacaccagcaccagtttatatctggactgctgatgaagctattaaattcctaaaggaatggaatttttattgggtattatactactttttattacaatcatattgca |
| | | atttggatatacaagtcgcagtatgtttgtttatgttattaagatgattattttgtggcttatgtggccccttactataatcttaactattttcaattgcgtatacgcattgaataatgtgt |
| | | atcttggcctttctatagtttttaccatagtggccattattatgtggattgtgtattttgtgaatagtatcaggttgtttattagaactggaagtttttggagtttcaacccagaaacaaa |
| | | caacttgatgtgtatagatatgaaaggaacaatgtatgttaggccgataattgaggactatcatactctgacggtcacaataatacgcggccatctttacattcaaggtataaaa |
| | | ctaggtactggctattattggcagatttgccagcttatatgactgttgctaaggttacacacctgtgcacatataagcgtggttttcttgacaggataagcgatactagtggtttt |
| | | gctgtttatgttaagtccaaagtcggtaattaccgactgccatcaacccaaaagggttctggcatggacaccgcattgttgagaaataatatctaaattttaaggatgtatttac |
| | | tcctggtaagcaatccagtagtagagcgtcctctggaaatcgttctggtaatggcatcctcaagtgggccgatcagtccgaccagtttagaaatgttcaaaccaggggtaga |
| | | agagctcaacccaagcaaactgctacctctcagcaaccatcaggagggaatgttgtaccctactattcttggttctctggaattactcagtttcaaaagggaaaggagtttga |
| | | gtttgtagaaggacaaggtgtgcctattgcaccaggagtcccagctactgaagctaaggggtactggtacagacacaacagacgttatttaaaacagccgatggcaacc |
| | | agcgtcaactgctgccacgatggtatttttactatctgggaacaggaccgcatgctaaagaccagtacggcaccgatattgacggagtctactgggtcgctagcaaccagg |
| | | ctgatgtcaataccccggctgacattgtcgatcgggacccaagtagcgatgaggctattccgactaggtttccgcctggcacggtactccctcagggttactatattgaagg |
| | | ctcaggaaggtctgctcctaattccagatctacttcgcgcacatccagcagagcctctagtgcaggatcgcgtagtagagccaattctggcaatagaacccctacctctggt |
| | | gtaacacctgacatggctgatcaaattgctagtcttgttctggcaaaacttggcaaggatgccactaaacctcagcaagtaactaagcatactgccaaagaagtcagacaga |
| | | aaattttgaataagccccgccagaagaggagccccaataaacaatgcactgttcagcagtgttttggtaagagaggccctaatcagaattttggtggtggagaaatgttaaa |
| | | acttggaactagtgacccacagttccccattcttgcagaactcgcacccacagctggtgcgtttttattggatcaagattagagttggccaaagtgcagaatttatctgggaat |
| | | cctgacgagccccagaaggatgtttatgaattgcgctataacggcgcaattaggtttgacagtacactttcaggttttgagaccataatgaaggtgctgaatgagaatttgaat |
| | | gcctatcaacaacaagatggtatgatgaatatgagtccaaaaccacagcgtcagcgtggtcataagaatggacaaggagaaaatgataatataagtgttgcagtgcccaa |
| | | aagccgcgtgcagcaaaataagagtagagagttgactgcagaggacatcagccttcttaagaagatggatgagccctatactgaagacacctcagaaatataagagaat |
| | | gaaccttatgtcggcatctggtggtaacccctcgcagaaaagtcgagataaggcactctctatcagaatggatgtcttgctgctataatagatagagaaggttatagcagact |
| | | atagattaattagttgaaagttttgtgttgtaatgtatagtgttggagaaagtgaaagacttgcggaagtaattgccgacaagtgcccaagggaagagccagcatgttaagtta |
| | | ccacccagtaattagtaaatgaatgaagttaattatggccaattggaagaatcacaaaaaaaaaaaaaaaaaaaaaaaaaaaa |

TABLE 4
Biological Assay Results for Assessed siNA

| | SARS-CoV-2 nanoluc | pSiCHECK-2 reporter | pSiCHECK-2 reporter assay Cos-7 at |
|---|---|---|---|
| | hACE-2 A549 assay | assay Cos-7 | least 50% inhibition |
| | A: <0.1 nM EC50; | A: <0.2 nM EC50; | yes (y)/no (n)/undetermimed (u). |
| | B: 0.1-1.0 nM EC50; | B: 0.2-1.0 nM EC50; | siRNAs w/>70% inhib. were followed |
| siNA Name | C: >1 nM EC50 | C: >1 nM EC50 | up w/EC50 (hACE-2 A549 assay) |
| ds-siNA-006 | | | n |
| ds-siNA-007 | | | n |
| ds-siNA-008 | | | n |
| ds-siNA-009 | | | n |
| ds-siNA-010 | | | u |
| ds-siNA-011 | | B | y |
| ds-siNA-012 | | | y |
| ds-siNA-013 | | | n |
| ds-siNA-014 | | | n |
| ds-siNA-015 | | | n |
| ds-siNA-016 | | | n |
| ds-siNA-017 | | | n |
| ds-siNA-018 | | B | y |
| ds-siNA-019 | | | y |
| ds-siNA-020 | | | y |
| ds-siNA-021 | | | y |
| ds-siNA-022 | | | n |
| ds-siNA-023 | | | n |
| ds-siNA-024 | | | n |
| ds-siNA-025 | | | u |
| ds-siNA-026 | | | u |
| ds-siNA-027 | | | y |
| ds-siNA-028 | | | n |
| ds-siNA-029 | | | n |
| ds-siNA-030 | | B | y |
| ds-siNA-031 | | | n |
| ds-siNA-032 | | | n |
| ds-siNA-033 | | | u |
| ds-siNA-034 | | | u |
| ds-siNA-035 | | | n |
| ds-siNA-036 | | | y |
| ds-siNA-037 | | | n |
| ds-siNA-038 | | | n |
| ds-siNA-039 | | A | y |
| ds-siNA-040 | | A | y |
| ds-siNA-041 | | | y |
| ds-siNA-042 | | | n |
| ds-siNA-043 | | | n |
| ds-siNA-044 | | | n |
| ds-siNA-045 | | | n |
| ds-siNA-046 | | | y |
| ds-siNA-047 | | | y |
| ds-siNA-048 | | | y |
| ds-siNA-049 | | | n |
| ds-siNA-050 | | | n |
| ds-siNA-051 | | B | y |
| ds-siNA-052 | | | y |
| ds-siNA-053 | | | n |
| ds-siNA-054 | | | n |
| ds-siNA-055 | | | n |
| ds-siNA-056 | | | n |
| ds-siNA-057 | | | u |
| ds-siNA-058 | | | u |
| ds-siNA-059 | | | u |
| ds-siNA-060 | | | y |
| ds-siNA-061 | | B | y |
| ds-siNA-062 | | B | y |
| ds-siNA-063 | | | n |
| ds-siNA-064 | | | y |
| ds-siNA-065 | | | y |
| ds-siNA-066 | | | n |
| ds-siNA-067 | | B | y |
| ds-siNA-068 | | | n |
| ds-siNA-069 | | | n |
| ds-siNA-070 | | | n |
| ds-siNA-071 | | | n |
| ds-siNA-072 | | | n |
| ds-siNA-073 | | | n |
| ds-siNA-074 | | | n |
| ds-siNA-075 | | C | y |
| ds-siNA-076 | | | y |
| ds-siNA-077 | | | n |
| ds-siNA-078 | | | n |
| ds-siNA-079 | | | u |
| ds-siNA-080 | | | n |
| ds-siNA-081 | | A | y |
| ds-siNA-082 | | B | y |
| ds-siNA-083 | | B | y |
| ds-siNA-084 | | | y |
| ds-siNA-085 | | | y |
| ds-siNA-086 | | | n |
| ds-siNA-087 | | A | y |
| ds-siNA-088 | | | y |
| ds-siNA-089 | | B | y |
| ds-siNA-090 | | | n |
| ds-siNA-091 | | | n |
| ds-siNA-092 | | | n |
| ds-siNA-093 | | | n |
| ds-siNA-094 | | | n |
| ds-siNA-095 | B | B | y |
| ds-siNA-096 | | | y |
| ds-siNA-097 | | | n |
| ds-siNA-098 | | | y |
| ds-siNA-099 | | | n |
| ds-siNA-100 | | | n |
| ds-siNA-101 | | | n |
| ds-siNA-102 | | | n |
| ds-siNA-103 | | | n |
| ds-siNA-104 | | | n |
| ds-siNA-105 | | | u |
| ds-siNA-106 | | B | y |
| ds-siNA-107 | | | y |
| ds-siNA-108 | | | y |
| ds-siNA-109 | | | n |
| ds-siNA-110 | | | n |
| ds-siNA-111 | | | n |
| ds-siNA-112 | | | n |
| ds-siNA-113 | | | y |
| ds-siNA-114 | | | y |
| ds-siNA-115 | | B | y |
| ds-siNA-116 | | | y |
| ds-siNA-117 | | | n |
| ds-siNA-118 | | | n |
| ds-siNA-119 | | | y |
| ds-siNA-120 | | | u |
| ds-siNA-121 | | | u |
| ds-siNA-122 | | | y |
| ds-siNA-123 | | | n |
| ds-siNA-124 | | | n |
| ds-siNA-125 | | B | y |
| ds-siNA-126 | | | n |
| ds-siNA-127 | | | n |
| ds-siNA-128 | | | u |
| ds-siNA-129 | | | u |
| ds-siNA-130 | | | n |
| ds-siNA-131 | | | y |
| ds-siNA-132 | | | n |
| ds-siNA-133 | | | n |
| ds-siNA-134 | | A | y |
| ds-siNA-135 | | A | y |
| ds-siNA-136 | | | y |
| ds-siNA-137 | | | n |
| ds-siNA-138 | | | n |
| ds-siNA-139 | | | n |
| ds-siNA-140 | | | n |
| ds-siNA-141 | | | n |
| ds-siNA-142 | | | y |
| ds-siNA-143 | | | y |
| ds-siNA-144 | | | n |
| ds-siNA-145 | | | n |
| ds-siNA-146 | | B | y |
| ds-siNA-147 | | | n |
| ds-siNA-148 | | | n |
| ds-siNA-149 | | | n |
| ds-siNA-150 | | C | y |
| ds-siNA-151 | | | n |
| ds-siNA-152 | | | u |
| ds-siNA-153 | | | u |
| ds-siNA-154 | | | u |
| ds-siNA-155 | | | y |
| ds-siNA-156 | | B | y |
| ds-siNA-157 | | B | y |
| ds-siNA-158 | | | n |
| ds-siNA-159 | | | y |
| ds-siNA-160 | | | y |
| ds-siNA-161 | | | n |
| ds-siNA-162 | | B | y |
| ds-siNA-163 | | | n |
| ds-siNA-164 | | | y |
| ds-siNA-165 | | | y |
| ds-siNA-166 | | | y |
| ds-siNA-167 | | | y |
| ds-siNA-168 | | | n |
| ds-siNA-169 | | | n |
| ds-siNA-170 | C | B | y |
| ds-siNA-171 | | | y |
| ds-siNA-172 | | | y |
| ds-siNA-173 | | B | y |
| ds-siNA-174 | | | u |
| ds-siNA-175 | | | y |
| ds-siNA-176 | C | A | y |
| ds-siNA-177 | | A | y |
| ds-siNA-178 | | B | y |
| ds-siNA-179 | | B | y |
| ds-siNA-180 | | B | y |
| ds-siNA-181 | | | y |
| ds-siNA-182 | | | y |
| ds-siNA-183 | | A | y |
| ds-siNA-184 | | B | y |
| ds-siNA-185 | | | n |
| ds-siNA-186 | | | n |
| ds-siNA-187 | | | n |
| ds-siNA-188 | | | n |
| ds-siNA-189 | | | n |
| ds-siNA-190 | | | y |
| ds-siNA-191 | | | y |
| ds-siNA-192 | | | y |
| ds-siNA-193 | B | B | y |
| ds-siNA-194 | | | n |
| ds-siNA-195 | | | n |
| ds-siNA-196 | A | B | |
| ds-siNA-197 | B | B | |
| ds-siNA-198 | B | A | |
| ds-siNA-199 | A | B | |
| ds-siNA-217 | | A | |
| ds-siNA-218 | | A | |
| ds-siNA-219 | | A | |
| ds-siNA-220 | | A | |
| ds-siNA-221 | | A | |
| ds-siNA-222 | | A | |

1. A short interfering nucleic acid (siNA) molecule comprising:
(a) a sense strand comprising a first nucleotide sequence, wherein the first nucleotide sequence is 15 to 30 nucleotides in length and comprises a nucleotide sequence that is at least about 60%, 65%, 70%, 75%, 80%, 85%, 90%, 95%, or 100% identical to an RNA corresponding to of any one of SEQ ID NOs: 1-1203 and 2411-3392; and
(b) an antisense strand comprising a second nucleotide sequence, wherein the second nucleotide sequence is 15 to 30 nucleotides in length and comprises a nucleotide sequence that is at least about 60%, 65%, 70%, 75%, 80%, 85%, 90%, 95%, or 100% complementary to the first nucleotide sequence.

2. The siNA molecule of claim 1, wherein the first nucleotide sequence is identical to an RNA corresponding to 15 to 30 nucleotides within positions 190-216, 233-279, 288-324, 455-477, 626-651, 704-723, 3352-3378, 5384-5403, 6406-6483, 7532-7551, 9588-9606, 10484-10509, 11609-11630, 11834-11853, 12023-12045, 12212-12234, 12401-12420, 12839-12867, 12885-12924, 12966-12990, 13151-13176, 13363-13386, 13388-13416, 13458-13416, 13458-13520, 13762-13790, 14290-14312, 14404-14429, 14500-14531, 14623-14642, 14650-14687, 14698-14717, 14722-14748, 14750-14777, 14821-14846, 14854-14873, 14875-14903, 14962-14990, 14992-15020, 15055-15140, 15172-15200, 15310-15332, 15346-15367, 15496-15518, 15622-15644, 15838-15869, 15886-15905, 15985-16010, 16057-16079, 16186-16205, 16430-16448, 16822-16865, 16954-16976, 17008-17042, 17080-17111, 17137-17156, 17269-17289, 17530-17549, 17563-17582, 17680-17699, 17746-17765, 17857-17876, 17956-17975, 18100-18122, 18196-18218, 19618-19639, 19783-19802, 19831-19850, 20107-20130, 20776-20795, 21502-21524, 24302-24325, 24446-24465, 24620-24651, 24662-24684, 25034-25057, 25104-25128, 25364-25387, 25502-25530, 26191-26227, 26232-26267, 26269-26330, 26332-26394, 26450-26481, 26574-26600, 27003-27064, 27093-27111, 27183-27212, 27382-27407, 27511-27533, 27771-27818, 28270-28296, 28397-28434, 28513-28546, 28673-28692, 28706-28726, 28744-28794, 28799-28827, 28946-28972, 28976-29034, 29144-29172, 29174-29196, 29228-29259, 29285-29305, 29342-29394, 29444-29463, 29543-29566, 29598-29630, 29652-29687, 29689-29731, 29733-29757.

3. The siNA molecule of claim 1, wherein the second nucleotide sequence is complementary to an RNA corresponding to 15 to 30 nucleotides within positions 190-216, 233-279, 288-324, 455-477, 626-651, 704-723, 3352-3378, 5384-5403, 6406-6483, 7532-7551, 9588-9606, 10484-10509, 11609-11630, 11834-11853, 12023-12045, 12212-12234, 12401-12420, 12839-12867, 12885-12924, 12966-12990, 13151-13176, 13363-13386, 13388-13416, 13458-13416, 13458-13520, 13762-13790, 14290-14312, 14404-14429, 14500-14531, 14623-14642, 14650-14687, 14698-14717, 14722-14748, 14750-14777, 14821-14846, 14854-14873, 14875-14903, 14962-14990, 14992-15020, 15055-15140, 15172-15200, 15310-15332, 15346-15367, 15496-15518, 15622-15644, 15838-15869, 15886-15905, 15985-16010, 16057-16079, 16186-16205, 16430-16448, 16822-16865, 16954-16976, 17008-17042, 17080-17111, 17137-17156, 17269-17289, 17530-17549, 17563-17582, 17680-17699, 17746-17765, 17857-17876, 17956-17975, 18100-18122, 18196-18218, 19618-19639, 19783-19802, 19831-19850, 20107-20130, 20776-20795, 21502-21524, 24302-24325, 24446-24465, 24620-24651, 24662-24684, 25034-25057, 25104-25128, 25364-25387, 25502-25530, 26191-26227, 26232-26267, 26269-26330, 26332-26394, 26450-26481, 26574-26600, 27003-27064, 27093-27111, 27183-27212, 27382-27407, 27511-27533, 27771-27818, 28270-28296, 28397-28434, 28513-28546, 28673-28692, 28706-28726, 28744-28794, 28799-28827, 28946-28972, 28976-29034, 29144-29172, 29174-29196, 29228-29259, 29285-29305, 29342-29394, 29444-29463, 29543-29566, 29598-29630, 29652-29687, 29689-29731, 29733-29757, or 29770-29828 of SEQ ID NO: 2407.

4. The siNA molecule of claim 1, wherein the sense strand comprises a nucleotide sequence identical to an RNA corresponding to any one of SEQ ID NOs: 1-1203 and 2411-3392.

5. The siNA molecule of claim 1, wherein the antisense strand comprises a nucleotide sequence identical to an RNA corresponding to any one of SEQ ID NOs: 1204-2406 and 3393-4374 and (b) a sense strand.

6. The siNA of claim 1, wherein the sense strand comprises 15 or more modified nucleotides independently selected from a 2′-O-methyl nucleotide and a 2′-fluoro nucleotide, wherein at least one modified nucleotide is a 2′-O-methyl nucleotide and the nucleotide at position 3, 5, 7, 8, 9, 10, 11, 12, 14, 17, and/or 19 from the 5′ end is a 2′-fluoro nucleotide; and the antisense strand comprises 15 or more modified nucleotides independently selected from a 2′-O-methyl nucleotide and a 2′-fluoro nucleotide, wherein at least one modified nucleotide is a 2′-O-methyl nucleotide and at least one modified nucleotide is a 2′-fluoro nucleotide.

7. The siNA of claim 1, wherein the sense strand comprises 15 or more modified nucleotides independently selected from a 2′-O-methyl nucleotide and a 2′-fluoro nucleotide, wherein at least one modified nucleotide is a 2′-O-methyl nucleotide and at least one modified nucleotide is a 2′-fluoro nucleotide; and the antisense strand comprises 15 or more modified nucleotides independently selected from a 2′-O-methyl nucleotide and a 2′-fluoro nucleotide, wherein at least one modified nucleotide is a 2′-O-methyl nucleotide and the nucleotide at position 2, 5, 6, 8, 10, 14, 16, 17, and/or 18 from the 5′ end is a 2′-fluoro nucleotide.

8. The siNA of claim 1, wherein the sense strand comprises 16, 17, 18, 19, 20, 21, 22, 23, or more modified nucleotides independently selected from a 2′-O-methyl nucleotide and a 2′-fluoro nucleotide.

9. The siNA of claim 1, wherein 70%, 75%, 80%, 85%, 90%, 95% or 100% of the nucleotides in the sense strand are modified nucleotides independently selected from a 2′-O-methyl nucleotide and a 2′-fluoro nucleotide.

10. The siNA of claim 1, wherein:
(i) at least 2, 3, 4, 5, or 6 modified nucleotides of the sense strand are 2′-fluoro nucleotides;
(ii) no more than 10, 9, 8, 7, 6, 5, 4, 3, or 2 modified nucleotides of the sense strand are 2′-fluoro nucleotides;
(iii) at least 10, 11, 12, 13, 14, 15, 16, 17, 18, 19, 20, 21, or 22 modified nucleotides of the sense strand sequence are 2′-O-methyl nucleotides; and/or
(iv) no more than 25, 24, 23, 22, 21, 20, 19, 18, 17, 16, 15, 14, 13, 12, 11, 10, 9, 8, 7, 6, 5, 4, 3, or 2 modified nucleotides of the sense strand are 2′-O-methyl nucleotides.

11. The siRNA of claim 1, wherein the antisense strand comprises 16, 17, 18, 19, 20, 21, 22, 23, or more modified nucleotides independently selected from a 2′-O-methyl nucleotide and a 2′-fluoro nucleotide.

12. The siNA of claim 1, wherein 70%, 75%, 80%, 85%, 90%, 95% or 100% of the nucleotides in the antisense strand are modified nucleotides independently selected from a 2′-O-methyl nucleotide and a 2′-fluoro nucleotide.

13. The siNA of claim 1, wherein:
(i) at least 2, 3, 4, 5, or 6 modified nucleotides of the antisense strand are 2′-fluoro nucleotides;
(ii) no more than 10, 9, 8, 7, 6, 5, 4, 3, or 2 modified nucleotides of the antisense strand are 2′-fluoro nucleotides;
(iii) at least 10, 11, 12, 13, 14, 15, 16, 17, 18, 19, 20, 21, or 22 modified nucleotides of the antisense strand sequence are 2′-O-methyl nucleotides; and/or
(iv) no more than 25, 24, 23, 22, 21, 20, 19, 18, 17, 16, 15, 14, 13, 12, 11, 10, 9, 8, 7, 6, 5, 4, 3, or 2 modified nucleotides of the antisense strand are 2′-O-methyl nucleotides.

14. The siNA of claim 1, wherein the sense strand and/or the antisense strand comprise one or more phosphorothioate internucleoside linkage(s).

15. The siNA of claim 1, wherein the siNA further comprises a phosphorylation blocker and/or a 5′-stabilized end cap.

16. The siNA of claim 1, wherein the sense strand further comprises a TT sequence adjacent to the first nucleotide sequence.

17. The siNA of claim 1, wherein at least one end of the siNA is a blunt end.

18. The siNA of claim 1, wherein at least one end of the siNA comprises an overhang, wherein the overhang comprises at least one nucleotide.

19. The siNA of claim 1, wherein at both ends of the siNA comprise an overhang, wherein the overhang comprises at least one nucleotide.

20. The siNA of claim 1, wherein the sense strand and/or the antisense strand comprises one or more modified nucleotides.

21. The siNA of claim 1, wherein the sense strand and/or the antisense strand further comprises at least 1, 2, 3, 4, 5, 6, 7, 8, 9, 10, 11, 12, 13, 14, 15 or more phosphorothioate internucleotide linkages.

22-23. (canceled)

24. The siNA of claim 20, wherein the modified nucleotides are independently selected from 2′-O-methyl nucleotides and 2′-fluoro nucleotides.

25. The siNA of claim 0, wherein at least one 2′-fluoro nucleotide or 2′-O-methyl nucleotide is a 2′-fluoro or 2′-O-methyl nucleotide mimic of Formula (V): [chemical structure]
wherein
R¹ is a nucleobase, aryl, heteroaryl, or H,
Q¹ and Q² are independently S or O,
R⁵ is —OCD₃, —F, or —OCH₃, and
R⁶ and R⁷ are independently H or D;
or a 2′-fluoro nucleotide 2′-fluoro nucleotide mimic selected from

[chemical structure]

26. The siNA of claim 1, wherein the sense strand and/or antisense strand comprises at least one modified nucleotide selected from [chemical structure]
where R is H or alkyl (or AmNA(N-Me)) when R is alkyl); [chemical structure]
wherein B is a nucleobase.

27. The siNA of claim 1, wherein the ds-siNA further comprises a phosphorylation blocker and/or a 5′-stabilized end cap.

28. The siNA of claim 0, wherein the phosphorylation blocker has the structure of Formula (IV): [chemical structure]
wherein
R¹ is a nucleobase,
R⁴ is —O—R³⁰ or —NR³¹R³²,
R³⁰ is C₁-C₈ substituted or unsubstituted alkyl; and
R³¹ and R³² together with the nitrogen to which they are attached form a substituted or unsubstituted heterocyclic ring.

29. The siNA of claim 0, wherein R⁴ is —OCH₃ or —N(CH₂CH₂)₂O.

30. The siNA of claim 26, wherein the phosphorylation blocker is attached to the 5′ end of the sense strand.

31. The siNA of claim 0, wherein the phosphorylation blocker is attached to the 5′ end of the sense strand via one or more linkers independently selected from a phosphodiester linker, phosphorothioate linker, and phosphorodithioate linker.

32. The siNA of claim 0, wherein the 5′-stabilized end cap is a 5′ vinylphosphonate.

33. The siNA of claim 32, wherein the 5′ vinylphosphonate is selected from a 5′-(E)-vinyl phosphonate or 5′-(Z)-vinyl phosphonate.

34. The siNA of claim 32, wherein the 5′-vinylphosphonate is a deuterated vinyl phosphonate.

35. The siNA of claim 34, wherein the deuterated vinylphosphonate is a mono-deuterated vinylphosphonate or a di-deuterated vinylphosphonate.

36. The siNA of claim 0, wherein the 5′-stabilized end cap has the structure of Formula (Ia): [chemical structure]
wherein
R¹ is a nucleobase, aryl, heteroaryl, or H,
R² is [chemical structure]
—CH═CD-Z, —CD=CH—Z, —CD=CD-Z, —(CR²¹R²²)ₙ—Z, or —(C₂-C₆ alkenylene)-Z and R²⁰ is hydrogen; or
R² and R²⁰ together form a 3- to 7-membered carbocyclic ring substituted with —(CR²¹R²²)ₙ—Z or —(C₂-C₆ alkenylene)-Z;
n is 1, 2, 3, or 4;
Z is —ONR²³R²⁴, —OP(O)OH(CH₂)ₘCO₂R²³, —OP(S)OH(CH₂)ₘCO₂R²³, —P(O)(OH)₂, —P(O)(OH)(OCH₃), —P(O)(OH)(OCD₃), —SO₂(CH₂)ₘP(O)(OH)₂, —SO₂NR²³R²⁵, —NR²³R²⁴, or —NR²³SO₂R²⁵;
R²¹ and R²² either are independently hydrogen or C₁-C₆ alkyl, or R²¹ and R²² together form an oxo group;
R²³ is hydrogen or C₁-C₆ alkyl;
R²⁴ is —SO₂R²⁵ or —C(O)R²⁵; or
R²³ and R²⁴ together with the nitrogen to which they are attached form a substituted or unsubstituted heterocyclic ring;
R²⁵ is C₁-C₆ alkyl; and
m is 1, 2, 3, or 4.

37. The siNA of claim 0, wherein R¹ is an aryl.

38. The siNA of claim 0, wherein the aryl is a phenyl.

39. The siNA of claim 26, wherein the 5′-stabilized end cap has the structure of Formula (Ib): [chemical structure]
wherein
R¹ is a nucleobase, aryl, heteroaryl, or H,
R² is [chemical structure]
—CH═CD-Z, —CD=CH—Z, —CD=CD-Z, —(CR²¹R²²)ₙ—Z, or —(C₂-C₆ alkenylene)-Z and R²⁰ is hydrogen; or
R² and R²⁰ together form a 3- to 7-membered carbocyclic ring substituted with —(CR²¹R²²)ₙ—Z or —(C₂-C₆ alkenylene)-Z;
n is 1, 2, 3, or 4;
Z is —ONR²³R²⁴, —OP(O)OH(CH₂)ₘCO₂R²³, —OP(S)OH(CH₂)ₘCO₂R²³, —P(O)(OH)₂, —P(O)(OH)(OCH₃), —P(O)(OH)(OCD₃), —SO₂(CH₂)ₘP(O)(OH)₂, —SO₂NR²³R²⁵, —NR²³R²⁴,
R²¹ and R²² are independently hydrogen or C₁-C₆ alkyl; R²¹ and R²² together form an oxo group;
R²³ is hydrogen or C₁-C₆ alkyl;
R²⁴ is —SO₂R²⁵ or —C(O)R²⁵; or
R²³ and R²⁴ together with the nitrogen to which they are attached form a substituted or unsubstituted heterocyclic ring;
R²⁵ is C₁-C₆ alkyl; and
m is 1, 2, 3, or 4.

40. The siNA of claim 26, wherein the 5′-stabilized end cap is selected from the group consisting of Formula (1) to Formula (15), Formula (9X) to Formula (12X), and Formula (9Y) to Formula (12Y): [chemical structure] [chemical structure] [chemical structure]
wherein R¹ is a nucleobase, aryl, heteroaryl, or H.

41. The siNA of claim 26, wherein the 5′-stabilized end cap is selected from the group consisting of Formulas (1A)-(15A), Formulas (9B)-(12B), Formulas (9AX)-(12AX), Formulas (9AY)-(12AY), Formulas (9BX)-(12BX), and Formulas (9BY)-(12BY):

[chemical structure]

[chemical structure]

[chemical structure]

[chemical structure]

[chemical structure]

42. The siNA of any of claim 26, wherein the 5′-stabilized end cap is attached to the 5′ end of the antisense strand.

43. The siNA of claim 42, wherein the 5′-stabilized end cap is attached to the 5′ end of the antisense strand via one or more linkers independently selected from a phosphodiester linker, phosphorothioate linker, phosphoramidite (HEG) linker, triethylene glycol (TEG) linker, or phosphorodithioate linker.

44. The siNA molecule of claim 1, wherein the sense strand consists of 21 nucleotides.

45. The siNA molecule of claim 44, wherein 2′-O-methyl nucleotides are at positions 18-21 from the 5′ end of the sense strand.

46. The siNA molecule of claim 1, wherein the antisense strand consists of 23 nucleotides.

47. The siNA molecule of claim 46, wherein 2′-O-methyl nucleotides are at positions 18-23 from the 5′ end of the antisense strand.

48. An siNA selected from ds-siNA-005; ds-siNA-006; ds-siNA-007; ds-siNA-008; ds-siNA-009; ds-siNA-010; ds-siNA-011; ds-siNA-012; ds-siNA-013; ds-siNA-014; ds-siNA-015; ds-siNA-016; ds-siNA-017; ds-siNA-018; ds-siNA-019; ds-siNA-020; ds-siNA-021; ds-siNA-022; ds-siNA-023; ds-siNA-024; ds-siNA-025; ds-siNA-026; ds-siNA-027; ds-siNA-028; ds-siNA-029; ds-siNA-030; ds-siNA-031; ds-siNA-032; ds-siNA-033; ds-siNA-034; ds-siNA-035; ds-siNA-036; ds-siNA-037; ds-siNA-038; ds-siNA-039; ds-siNA-040; ds-siNA-041; ds-siNA-042; ds-siNA-043; ds-siNA-044; ds-siNA-045; ds-siNA-046; ds-siNA-047; ds-siNA-048; ds-siNA-049; ds-siNA-050; ds-siNA-051; ds-siNA-052; ds-siNA-053; ds-siNA-054; ds-siNA-055; ds-siNA-056; ds-siNA-057; ds-siNA-058; ds-siNA-059; ds-siNA-060; ds-siNA-061; ds-siNA-062; ds-siNA-063; ds-siNA-064; ds-siNA-065; ds-siNA-066; ds-siNA-067; ds-siNA-068; ds-siNA-069; ds-siNA-070; ds-siNA-071; ds-siNA-072; ds-siNA-073; ds-siNA-074; ds-siNA-075; ds-siNA-076; ds-siNA-077; ds-siNA-078; ds-siNA-079; ds-siNA-080; ds-siNA-081; ds-siNA-082; ds-siNA-083; ds-siNA-084; ds-siNA-085; ds-siNA-086; ds-siNA-087; ds-siNA-088; ds-siNA-089; ds-siNA-090; ds-siNA-091; ds-siNA-092; ds-siNA-093; ds-siNA-094; ds-siNA-095; ds-siNA-096; ds-siNA-097; ds-siNA-098; ds-siNA-099; ds-siNA-100; ds-siNA-101; ds-siNA-102; ds-siNA-103; ds-siNA-104; ds-siNA-105; ds-siNA-106; ds-siNA-107; ds-siNA-108; ds-siNA-109; ds-siNA-110; ds-siNA-111; ds-siNA-112; ds-siNA-113; ds-siNA-114; ds-siNA-115; ds-siNA-116; ds-siNA-117; ds-siNA-118; ds-siNA-119; ds-siNA-120; ds-siNA-121; ds-siNA-122; ds-siNA-123; ds-siNA-124; ds-siNA-125; ds-siNA-126; ds-siNA-127; ds-siNA-128; ds-siNA-129; ds-siNA-130; ds-siNA-131; ds-siNA-132; ds-siNA-133; ds-siNA-134; ds-siNA-135; ds-siNA-136; ds-siNA-137; ds-siNA-138; ds-siNA-139; ds-siNA-140; ds-siNA-141; ds-siNA-142; ds-siNA-143; ds-siNA-144; ds-siNA-145; ds-siNA-146; ds-siNA-147; ds-siNA-148; ds-siNA-149; ds-siNA-150; ds-siNA-151; ds-siNA-152; ds-siNA-153; ds-siNA-154; ds-siNA-155; ds-siNA-156; ds-siNA-157; ds-siNA-158; ds-siNA-159; ds-siNA-160; ds-siNA-161; ds-siNA-162; ds-siNA-163; ds-siNA-164; ds-siNA-165; ds-siNA-166; ds-siNA-167; ds-siNA-168; ds-siNA-169; ds-siNA-170; ds-siNA-171; ds-siNA-172; ds-siNA-173; ds-siNA-174; ds-siNA-175; ds-siNA-176; ds-siNA-177; ds-siNA-178; ds-siNA-179; ds-siNA-180; ds-siNA-181; ds-siNA-182; ds-siNA-183; ds-siNA-184; ds-siNA-185; ds-siNA-186; ds-siNA-187; ds-siNA-188; ds-siNA-189; ds-siNA-190; ds-siNA-191; ds-siNA-192; ds-siNA-193; ds-siNA-194; ds-siNA-195; ds-siNA-196; ds-siNA-197; ds-siNA-198; ds-siNA-199; ds-siNA-200; ds-siNA-201; ds-siNA-202; ds-siNA-203; ds-siNA-204; ds-siNA-205; ds-siNA-206; ds-siNA-207; ds-siNA-208; ds-siNA-209; ds-siNA-210; ds-siNA-211; ds-siNA-212; ds-siNA-213; ds-siNA-214; ds-siNA-215; ds-siNA-216; ds-siNA-217; ds-siNA-218; ds-siNA-219; ds-siNA-220; ds-siNA-221; and ds-siNA-222.

49. The siNA of claim 48, wherein the siNA is selected from ds-siNA-196 (sense and antisense respectively comprising SEQ ID NOs: 4578 and 4800), ds-siNA-197 (sense and antisense respectively comprising SEQ ID NOs: 4579 and 4801), ds-siNA-198 (sense and antisense respectively comprising SEQ ID NOs: 4580 and 4802), ds-siNA-199 (sense and antisense respectively comprising SEQ ID NOs: 4581 and 4803), ds-siNA-217 (sense and antisense respectively comprising SEQ ID NOs: 4599 and 4821), ds-siNA-218 (sense and antisense respectively comprising SEQ ID NOs: 4600 and 4822), ds-siNA-219 (sense and antisense respectively comprising SEQ ID NOs: 4601 and 4823), ds-siNA-220 (sense and antisense respectively comprising SEQ ID NOs: 4602 and 4824), ds-siNA-221 (sense and antisense respectively comprising SEQ ID NOs: 4603 and 4825), and ds-siNA-222 (sense and antisense respectively comprising SEQ ID NOs: 4604 and 4826).

50. The siNA of claim 48, wherein the siNA is selected from ds-siNA-196 (sense and antisense respectively comprising SEQ ID NOs: 4578 and 4800), ds-siNA-197 (sense and antisense respectively comprising SEQ ID NOs: 4579 and 4801), ds-siNA-198 (sense and antisense respectively comprising SEQ ID NOs: 4580 and 4802), and ds-siNA-199 (sense and antisense respectively comprising SEQ ID NOs: 4581 and 4803).

51. The siNA of claim 48, wherein the siNA is selected from, ds-siNA-217 (sense and antisense respectively comprising SEQ ID NOs: 4599 and 4821), ds-siNA-218 (sense and antisense respectively comprising SEQ ID NOs: 4600 and 4822), ds-siNA-219 (sense and antisense respectively comprising SEQ ID NOs: 4601 and 4823), ds-siNA-220 (sense and antisense respectively comprising SEQ ID NOs: 4602 and 4824), ds-siNA-221 (sense and antisense respectively comprising SEQ ID NOs: 4603 and 4825), and ds-siNA-222 (sense and antisense respectively comprising SEQ ID NOs: 4604 and 4826).

52. A pharmaceutical composition comprising at least one siNA according to claim 1 and a pharmaceutically acceptable carrier or diluent.

53. A pharmaceutical composition comprising at least one siNA according to claim 48 and a pharmaceutically acceptable carrier or diluent.

54-55. (canceled)

56. A method of treating a disease caused by a β-coronavirus in a subject in need thereof, comprising administering the subject at least one siNA according to claim 1.

57-75. (canceled)

76. A method of treating a β-coronavirus-caused disease in a subject in need thereof, comprising administering the subject at least one siNA of claim 48.

77-83. (canceled)

The application's sequence listing, which the Patent Office published only in electronic form, follows.

SEQUENCE LISTING (4830 sequences)

SEQ ID NO: 1 - DNA, 19 bp, Severe acute respiratory syndrome coronavirus 2
ctgcttacggtttcgtccg

SEQ ID NO: 2 - DNA, 19 bp, Severe acute respiratory syndrome coronavirus 2
tgcttacggtttcgtccgt

SEQ ID NO: 3 - DNA, 19 bp, Severe acute respiratory syndrome coronavirus 2
gcttacggtttcgtccgtg

SEQ ID NO: 4 - DNA, 19 bp, Severe acute respiratory syndrome coronavirus 2
cttacggtttcgtccgtgt

SEQ ID NO: 5 - DNA, 19 bp, Severe acute respiratory syndrome coronavirus 2
ttacggtttcgtccgtgtt

SEQ ID NO: 6 - DNA, 19 bp, Severe acute respiratory syndrome coronavirus 2
tacggtttcgtccgtgttg

SEQ ID NO: 7 - DNA, 19 bp, Severe acute respiratory syndrome coronavirus 2
acggtttcgtccgtgttgc

SEQ ID NO: 8 - DNA, 19 bp, Severe acute respiratory syndrome coronavirus 2
cggtttcgtccgtgttgca

SEQ ID NO: 9 - DNA, 19 bp, Severe acute respiratory syndrome coronavirus 2
ggtttcgtccgtgttgcag

SEQ ID NO: 10 - DNA, 19 bp, Severe acute respiratory syndrome coronavirus 2
ctaggtttcgtccgggtgt

SEQ ID NO: 11 - DNA, 19 bp, Severe acute respiratory syndrome coronavirus 2
taggtttcgtccgggtgtg

SEQ ID NO: 12 - DNA, 19 bp, Severe acute respiratory syndrome coronavirus 2
aggtttcgtccgggtgtga

SEQ ID NO: 13 - DNA, 19 bp, Severe acute respiratory syndrome coronavirus 2
ggtttcgtccgggtgtgac

SEQ ID NO: 14 - DNA, 19 bp, Severe acute respiratory syndrome coronavirus 2
gtttcgtccgggtgtgacc

SEQ ID NO: 15 - DNA, 19 bp, Severe acute respiratory syndrome coronavirus 2
tttcgtccgggtgtgaccg

SEQ ID NO: 16 - DNA, 19 bp, Severe acute respiratory syndrome coronavirus 2
ttcgtccgggtgtgaccga

SEQ ID NO: 17 - DNA, 19 bp, Severe acute respiratory syndrome coronavirus 2
tcgtccgggtgtgaccgaa

SEQ ID NO: 18 - DNA, 19 bp, Severe acute respiratory syndrome coronavirus 2
cgtccgggtgtgaccgaaa

SEQ ID NO: 19 - DNA, 19 bp, Severe acute respiratory syndrome coronavirus 2
gtccgggtgtgaccgaaag

SEQ ID NO: 20 - DNA, 19 bp, Severe acute respiratory syndrome coronavirus 2
tccgggtgtgaccgaaagg

SEQ ID NO: 21 - DNA, 19 bp, Severe acute respiratory syndrome coronavirus 2
ccgggtgtgaccgaaaggt

SEQ ID NO: 22 - DNA, 19 bp, Severe acute respiratory syndrome coronavirus 2
cgggtgtgaccgaaaggta

SEQ ID NO: 23 - DNA, 19 bp, Severe acute respiratory syndrome coronavirus 2
gggtgtgaccgaaaggtaa

SEQ ID NO: 24 - DNA, 19 bp, Severe acute respiratory syndrome coronavirus 2
ggtgtgaccgaaaggtaag

SEQ ID NO: 25 - DNA, 19 bp, Severe acute respiratory syndrome coronavirus 2
gtgtgaccgaaaggtaaga

SEQ ID NO: 26 - DNA, 19 bp, Severe acute respiratory syndrome coronavirus 2
tgtgaccgaaaggtaagat

SEQ ID NO: 27 - DNA, 19 bp, Severe acute respiratory syndrome coronavirus 2
gtgaccgaaaggtaagatg

SEQ ID NO: 28 - DNA, 19 bp, Severe acute respiratory syndrome coronavirus 2
tgaccgaaaggtaagatgg

SEQ ID NO: 29 - DNA, 19 bp, Severe acute respiratory syndrome coronavirus 2
gaccgaaaggtaagatgga

SEQ ID NO: 30 - DNA, 19 bp, Severe acute respiratory syndrome coronavirus 2
accgaaaggtaagatggag

SEQ ID NO: 31 - DNA, 19 bp, Severe acute respiratory syndrome coronavirus 2
ccgaaaggtaagatggaga

SEQ ID NO: 32 - DNA, 19 bp, Severe acute respiratory syndrome coronavirus 2
cgaaaggtaagatggagag

SEQ ID NO: 33 - DNA, 19 bp, Severe acute respiratory syndrome coronavirus 2
gaaaggtaagatggagagc

SEQ ID NO: 34 - DNA, 19 bp, Severe acute respiratory syndrome coronavirus 2
aaaggtaagatggagagcc

SEQ ID NO: 35 - DNA, 19 bp, Severe acute respiratory syndrome coronavirus 2
aaggtaagatggagagcct

SEQ ID NO: 36 - DNA, 19 bp, Severe acute respiratory syndrome coronavirus 2
aggtaagatggagagcctt

SEQ ID NO: 37 - DNA, 19 bp, Severe acute respiratory syndrome coronavirus 2
ggtaagatggagagccttg

SEQ ID NO: 38 - DNA, 19 bp, Severe acute respiratory syndrome coronavirus 2
gtaagatggagagccttgt

SEQ ID NO: 39 - DNA, 19 bp, Severe acute respiratory syndrome coronavirus 2
tcaacgagaaaacacacgt

SEQ ID NO: 40 - DNA, 19 bp, Severe acute respiratory syndrome coronavirus 2
caacgagaaaacacacgtc

SEQ ID NO: 41 - DNA, 19 bp, Severe acute respiratory syndrome coronavirus 2
aacgagaaaacacacgtcc

SEQ ID NO: 42 - DNA, 19 bp, Severe acute respiratory syndrome coronavirus 2
acgagaaaacacacgtcca

SEQ ID NO: 43 - DNA, 19 bp, Severe acute respiratory syndrome coronavirus 2
cgagaaaacacacgtccaa

SEQ ID NO: 44 - DNA, 19 bp, Severe acute respiratory syndrome coronavirus 2
gagaaaacacacgtccaac

SEQ ID NO: 45 - DNA, 19 bp, Severe acute respiratory syndrome coronavirus 2
agaaaacacacgtccaact

SEQ ID NO: 46 - DNA, 19 bp, Severe acute respiratory syndrome coronavirus 2
gaaaacacacgtccaactc

SEQ ID NO: 47 - DNA, 19 bp, Severe acute respiratory syndrome coronavirus 2
aaaacacacgtccaactca

SEQ ID NO: 48 - DNA, 19 bp, Severe acute respiratory syndrome coronavirus 2
aaacacacgtccaactcag

SEQ ID NO: 49 - DNA, 19 bp, Severe acute respiratory syndrome coronavirus 2
aacacacgtccaactcagt

SEQ ID NO: 50 - DNA, 19 bp, Severe acute respiratory syndrome coronavirus 2
acacacgtccaactcagtt

SEQ ID NO: 51 - DNA, 19 bp, Severe acute respiratory syndrome coronavirus 2
cacacgtccaactcagttt

SEQ ID NO: 52 - DNA, 19 bp, Severe acute respiratory syndrome coronavirus 2
acacgtccaactcagtttg

SEQ ID NO: 53 - DNA, 19 bp, Severe acute respiratory syndrome coronavirus 2
cacgtccaactcagtttgc

SEQ ID NO: 54 - DNA, 19 bp, Severe acute respiratory syndrome coronavirus 2
acgtccaactcagtttgcc

SEQ ID NO: 55 - DNA, 19 bp, Severe acute respiratory syndrome coronavirus 2
cgtccaactcagtttgcct

SEQ ID NO: 56 - DNA, 19 bp, Severe acute respiratory syndrome coronavirus 2
gtccaactcagtttgcctg

SEQ ID NO: 57 - DNA, 19 bp, Severe acute respiratory syndrome coronavirus 2
tccaactcagtttgcctgt

SEQ ID NO: 58 - DNA, 19 bp, Severe acute respiratory syndrome coronavirus 2
cttgaacagccctatgtgt

SEQ ID NO: 59 - DNA, 19 bp, Severe acute respiratory syndrome coronavirus 2
ttgaacagccctatgtgtt

SEQ ID NO: 60 - DNA, 19 bp, Severe acute respiratory syndrome coronavirus 2
tgaacagccctatgtgttc

SEQ ID NO: 61 - DNA, 19 bp, Severe acute respiratory syndrome coronavirus 2
gaacagccctatgtgttca

SEQ ID NO: 62 - DNA, 19 bp, Severe acute respiratory syndrome coronavirus 2
aacagccctatgtgttcat

SEQ ID NO: 63 - DNA, 19 bp, Severe acute respiratory syndrome coronavirus 2
gttcttcttcgtaagaacg

SEQ ID NO: 64 - DNA, 19 bp, Severe acute respiratory syndrome coronavirus 2
ttcttcttcgtaagaacgg

SEQ ID NO: 65 - DNA, 19 bp, Severe acute respiratory syndrome coronavirus 2
tcttcttcgtaagaacggt

SEQ ID NO: 66 - DNA, 19 bp, Severe acute respiratory syndrome coronavirus 2
cttcttcgtaagaacggta

SEQ ID NO: 67 - DNA, 19 bp, Severe acute respiratory syndrome coronavirus 2
ttcttcgtaagaacggtaa

SEQ ID NO: 68 - DNA, 19 bp, Severe acute respiratory syndrome coronavirus 2
tcttcgtaagaacggtaat

SEQ ID NO: 69 - DNA, 19 bp, Severe acute respiratory syndrome coronavirus 2
cttcgtaagaacggtaata

SEQ ID NO: 70 - DNA, 19 bp, Severe acute respiratory syndrome coronavirus 2
ttcgtaagaacggtaataa

SEQ ID NO: 71 - DNA, 19 bp, Severe acute respiratory syndrome coronavirus 2
gacgagcttggcactgatc

SEQ ID NO: 72 - DNA, 19 bp, Severe acute respiratory syndrome coronavirus 2
acgagcttggcactgatcc

SEQ ID NO: 73 - DNA, 19 bp, Severe acute respiratory syndrome coronavirus 2
tggttatttaaaacttact

SEQ ID NO: 74 - DNA, 19 bp, Severe acute respiratory syndrome coronavirus 2
ggttatttaaaacttactg

SEQ ID NO: 75 - DNA, 19 bp, Severe acute respiratory syndrome coronavirus 2
gttatttaaaacttactga

SEQ ID NO: 76 - DNA, 19 bp, Severe acute respiratory syndrome coronavirus 2
ttatttaaaacttactgac

SEQ ID NO: 77 - DNA, 19 bp, Severe acute respiratory syndrome coronavirus 2
tatttaaaacttactgaca

SEQ ID NO: 78 - DNA, 19 bp, Severe acute respiratory syndrome coronavirus 2
atttaaaacttactgacaa

SEQ ID NO: 79 - DNA, 19 bp, Severe acute respiratory syndrome coronavirus 2
tttaaaacttactgacaat

SEQ ID NO: 80 - DNA, 19 bp, Severe acute respiratory syndrome coronavirus 2
ttaaaacttactgacaatg

SEQ ID NO: 81 - DNA, 19 bp, Severe acute respiratory syndrome coronavirus 2
taaaacttactgacaatgt

SEQ ID NO: 82 - DNA, 19 bp, Severe acute respiratory syndrome coronavirus 2
gctgctaacttttgtgcac

SEQ ID NO: 83 - DNA, 19 bp, Severe acute respiratory syndrome coronavirus 2
ctgctaacttttgtgcact

SEQ ID NO: 84 - DNA, 19 bp, Severe acute respiratory syndrome coronavirus 2
ctctgaagaagtagtggaa

SEQ ID NO: 85 - DNA, 19 bp, Severe acute respiratory syndrome coronavirus 2
tctgaagaagtagtggaaa

SEQ ID NO: 86 - DNA, 19 bp, Severe acute respiratory syndrome coronavirus 2
ctgaagaagtagtggaaaa

SEQ ID NO: 87 - DNA, 19 bp, Severe acute respiratory syndrome coronavirus 2
tgaagaagtagtggaaaat

SEQ ID NO: 88 - DNA, 19 bp, Severe acute respiratory syndrome coronavirus 2
gaagaagtagtggaaaatc

SEQ ID NO: 89 - DNA, 19 bp, Severe acute respiratory syndrome coronavirus 2
aagaagtagtggaaaatcc

SEQ ID NO: 90 - DNA, 19 bp, Severe acute respiratory syndrome coronavirus 2
agaagtagtggaaaatcct

SEQ ID NO: 91 - DNA, 19 bp, Severe acute respiratory syndrome coronavirus 2
gaagtagtggaaaatccta

SEQ ID NO: 92 - DNA, 19 bp, Severe acute respiratory syndrome coronavirus 2
aagtagtggaaaatcctac

SEQ ID NO: 93 - DNA, 19 bp, Severe acute respiratory syndrome coronavirus 2
agtagtggaaaatcctacc

SEQ ID NO: 94 - DNA, 19 bp, Severe acute respiratory syndrome coronavirus 2
gtgaaaactaccgaagttg

SEQ ID NO: 95 - DNA, 19 bp, Severe acute respiratory syndrome coronavirus 2
tgaaaactaccgaagttgt

SEQ ID NO: 96 - DNA, 19 bp, Severe acute respiratory syndrome coronavirus 2
gaaaactaccgaagttgta

SEQ ID NO: 97 - DNA, 19 bp, Severe acute respiratory syndrome coronavirus 2
aaaactaccgaagttgtag

SEQ ID NO: 98 - DNA, 19 bp, Severe acute respiratory syndrome coronavirus 2
aaactaccgaagttgtagg

SEQ ID NO: 99 - DNA, 19 bp, Severe acute respiratory syndrome coronavirus 2
tgtacaactattgttaatg

SEQ ID NO: 100 - DNA, 19 bp, Severe acute respiratory syndrome coronavirus 2
gtacaactattgttaatgg

SEQ ID NO: 101 - DNA, 19 bp, Severe acute respiratory syndrome coronavirus 2
tttacttgtacttgacatt

SEQ ID NO: 102 - DNA, 19 bp, Severe acute respiratory syndrome coronavirus 2
tcatgtggtagtgttggtt

SEQ ID NO: 103 - DNA, 19 bp, Severe acute respiratory syndrome coronavirus 2
catgtggtagtgttggttt

SEQ ID NO: 104 - DNA, 19 bp, Severe acute respiratory syndrome coronavirus 2
atgtggtagtgttggtttt

SEQ ID NO: 105 - DNA, 19 bp, Severe acute respiratory syndrome coronavirus 2
tgtggtagtgttggtttta

SEQ ID NO: 106 - DNA, 19 bp, Severe acute respiratory syndrome coronavirus 2
gtggtagtgttggttttaa

SEQ ID NO: 107 - DNA, 19 bp, Severe acute respiratory syndrome coronavirus 2
tggtagtgttggttttaac

SEQ ID NO: 108 - DNA, 19 bp, Severe acute respiratory syndrome coronavirus 2
ggtagtgttggttttaaca

SEQ ID NO: 109 - DNA, 19 bp, Severe acute respiratory syndrome coronavirus 2
gtagtgttggttttaacat

SEQ ID NO: 110 - DNA, 19 bp, Severe acute respiratory syndrome coronavirus 2
gtttattgtttcttaggct

SEQ ID NO: 111 - DNA, 19 bp, Severe acute respiratory syndrome coronavirus 2
tttattgtttcttaggcta

SEQ ID NO: 112 - DNA, 19 bp, Severe acute respiratory syndrome coronavirus 2
ttattgtttcttaggctat

SEQ ID NO: 113 - DNA, 19 bp, Severe acute respiratory syndrome coronavirus 2
tattgtttcttaggctatt

SEQ ID NO: 114 - DNA, 19 bp, Severe acute respiratory syndrome coronavirus 2
actgtacagtctaaaatgt

SEQ ID NO: 115 - DNA, 19 bp, Severe acute respiratory syndrome coronavirus 2
ctgtacagtctaaaatgtc

SEQ ID NO: 116 - DNA, 19 bp, Severe acute respiratory syndrome coronavirus 2
tccatgcagggtgctgtag

SEQ ID NO: 117 - DNA, 19 bp, Severe acute respiratory syndrome coronavirus 2
ccatgcagggtgctgtaga

SEQ ID NO: 118 - DNA, 19 bp, Severe acute respiratory syndrome coronavirus 2
catgcagggtgctgtagac

SEQ ID NO: 119 - DNA, 19 bp, Severe acute respiratory syndrome coronavirus 2
atgcagggtgctgtagaca

SEQ ID NO: 120 - DNA, 19 bp, Severe acute respiratory syndrome coronavirus 2
tgcagggtgctgtagacat

SEQ ID NO: 121 - DNA, 19 bp, Severe acute respiratory syndrome coronavirus 2
tctttgaatgtggctaaat

SEQ ID NO: 122 - DNA, 19 bp, Severe acute respiratory syndrome coronavirus 2
ctttgaatgtggctaaatc

SEQ ID NO: 123 - DNA, 19 bp, Severe acute respiratory syndrome coronavirus 2
tttgaatgtggctaaatct

SEQ ID NO: 124 - DNA, 19 bp, Severe acute respiratory syndrome coronavirus 2
ttgaatgtggctaaatctg

SEQ ID NO: 125 - DNA, 19 bp, Severe acute respiratory syndrome coronavirus 2
tgaatgtggctaaatctga

SEQ ID NO: 126 - DNA, 19 bp, Severe acute respiratory syndrome coronavirus 2
aacaacattatcaacaatg

SEQ ID NO: 127 - DNA, 19 bp, Severe acute respiratory syndrome coronavirus 2
acaacattatcaacaatgc

SEQ ID NO: 128 - DNA, 19 bp, Severe acute respiratory syndrome coronavirus 2
aaatgggctagattcccta

SEQ ID NO: 129 - DNA, 19 bp, Severe acute respiratory syndrome coronavirus 2
aatgggctagattccctaa

SEQ ID NO: 130 - DNA, 19 bp, Severe acute respiratory syndrome coronavirus 2
atgggctagattccctaag

SEQ ID NO: 131 - DNA, 19 bp, Severe acute respiratory syndrome coronavirus 2
tgggctagattccctaaga

SEQ ID NO: 132 - DNA, 19 bp, Severe acute respiratory syndrome coronavirus 2
gggctagattccctaagag

SEQ ID NO: 133 - DNA, 19 bp, Severe acute respiratory syndrome coronavirus 2
ggctagattccctaagagt

SEQ ID NO: 134 - DNA, 19 bp, Severe acute respiratory syndrome coronavirus 2
gctagattccctaagagtg

SEQ ID NO: 135 - DNA, 19 bp, Severe acute respiratory syndrome coronavirus 2
ctagattccctaagagtga

SEQ ID NO: 136 - DNA, 19 bp, Severe acute respiratory syndrome coronavirus 2
tagattccctaagagtgat

SEQ ID NO: 137 - DNA, 19 bp, Severe acute respiratory syndrome coronavirus 2
agattccctaagagtgatg

SEQ ID NO: 138 - DNA, 19 bp, Severe acute respiratory syndrome coronavirus 2
gattccctaagagtgatgg

SEQ ID NO: 139 - DNA, 19 bp, Severe acute respiratory syndrome coronavirus 2
cagaactggaaccaccttg

SEQ ID NO: 140 - DNA, 19 bp, Severe acute respiratory syndrome coronavirus 2
agaactggaaccaccttgt

SEQ ID NO: 141 - DNA, 19 bp, Severe acute respiratory syndrome coronavirus 2
gaactggaaccaccttgta

SEQ ID NO: 142 - DNA, 19 bp, Severe acute respiratory syndrome coronavirus 2
aactggaaccaccttgtag

SEQ ID NO: 143 - DNA, 19 bp, Severe acute respiratory syndrome coronavirus 2
actggaaccaccttgtagg

SEQ ID NO: 144 - DNA, 19 bp, Severe acute respiratory syndrome coronavirus 2
ctggaaccaccttgtaggt

SEQ ID NO: 145 - DNA, 19 bp, Severe acute respiratory syndrome coronavirus 2
tggaaccaccttgtaggtt

SEQ ID NO: 146 - DNA, 19 bp, Severe acute respiratory syndrome coronavirus 2
ggaaccaccttgtaggttt

SEQ ID NO: 147 - DNA, 19 bp, Severe acute respiratory syndrome coronavirus 2
gaaccaccttgtaggtttg

SEQ ID NO: 148 - DNA, 19 bp, Severe acute respiratory syndrome coronavirus 2
aaccaccttgtaggtttgt

SEQ ID NO: 149 - DNA, 19 bp, Severe acute respiratory syndrome coronavirus 2
accaccttgtaggtttgtt

SEQ ID NO: 150 - DNA, 19 bp, Severe acute respiratory syndrome coronavirus 2
ccaccttgtaggtttgtta

SEQ ID NO: 151 - DNA, 19 bp, Severe acute respiratory syndrome coronavirus 2
caccttgtaggtttgttac

SEQ ID NO: 152 - DNA, 19 bp, Severe acute respiratory syndrome coronavirus 2
accttgtaggtttgttaca

SEQ ID NO: 153 - DNA, 19 bp, Severe acute respiratory syndrome coronavirus 2
ccttgtaggtttgttacag

SEQ ID NO: 154 - DNA, 19 bp, Severe acute respiratory syndrome coronavirus 2
cttgtaggtttgttacaga

SEQ ID NO: 155 - DNA, 19 bp, Severe acute respiratory syndrome coronavirus 2
ttgtaggtttgttacagac

SEQ ID NO: 156 - DNA, 19 bp, Severe acute respiratory syndrome coronavirus 2
tgtaggtttgttacagaca

SEQ ID NO: 157 - DNA, 19 bp, Severe acute respiratory syndrome coronavirus 2
gtaggtttgttacagacac

SEQ ID NO: 158 - DNA, 19 bp, Severe acute respiratory syndrome coronavirus 2
taggtttgttacagacaca

SEQ ID NO: 159 - DNA, 19 bp, Severe acute respiratory syndrome coronavirus 2
aggtttgttacagacacac

SEQ ID NO: 160 - DNA, 19 bp, Severe acute respiratory syndrome coronavirus 2
ggtttgttacagacacacc

SEQ ID NO: 161 - DNA, 19 bp, Severe acute respiratory syndrome coronavirus 2
taaacaacctaaatagagg

SEQ ID NO: 162 - DNA, 19 bp, Severe acute respiratory syndrome coronavirus 2
aaacaacctaaatagaggt

SEQ ID NO: 163 - DNA, 19 bp, Severe acute respiratory syndrome coronavirus 2
aacaacctaaatagaggta

SEQ ID NO: 164 - DNA, 19 bp, Severe acute respiratory syndrome coronavirus 2
acaacctaaatagaggtat

SEQ ID NO: 165 - DNA, 19 bp, Severe acute respiratory syndrome coronavirus 2
caacctaaatagaggtatg

SEQ ID NO: 166 - DNA, 19 bp, Severe acute respiratory syndrome coronavirus 2
aacctaaatagaggtatgg

SEQ ID NO: 167 - DNA, 19 bp, Severe acute respiratory syndrome coronavirus 2
acctaaatagaggtatggt

SEQ ID NO: 168 - DNA, 19 bp, Severe acute respiratory syndrome coronavirus 2
aagatgttgtgtacacaca

SEQ ID NO: 169 - DNA, 19 bp, Severe acute respiratory syndrome coronavirus 2
agatgttgtgtacacacac

SEQ ID NO: 170 - DNA, 19 bp, Severe acute respiratory syndrome coronavirus 2
gatgttgtgtacacacact

SEQ ID NO: 171 - DNA, 19 bp, Severe acute respiratory syndrome coronavirus 2
atgttgtgtacacacactg

SEQ ID NO: 172 - DNA, 19 bp, Severe acute respiratory syndrome coronavirus 2
tgttgtgtacacacactgg

SEQ ID NO: 173 - DNA, 19 bp, Severe acute respiratory syndrome coronavirus 2
gttgtgtacacacactggt

SEQ ID NO: 174 - DNA, 19 bp, Severe acute respiratory syndrome coronavirus 2
ttgtgtacacacactggta

SEQ ID NO: 175 - DNA, 19 bp, Severe acute respiratory syndrome coronavirus 2
tgtgtacacacactggtac

SEQ ID NO: 176 - DNA, 19 bp, Severe acute respiratory syndrome coronavirus 2
aaacacagtctgtaccgtc

SEQ ID NO: 177 - DNA, 19 bp, Severe acute respiratory syndrome coronavirus 2
aacacagtctgtaccgtct

SEQ ID NO: 178 - DNA, 19 bp, Severe acute respiratory syndrome coronavirus 2
acacagtctgtaccgtctg

SEQ ID NO: 179 - DNA, 19 bp, Severe acute respiratory syndrome coronavirus 2
cacagtctgtaccgtctgc

SEQ ID NO: 180 - DNA, 19 bp, Severe acute respiratory syndrome coronavirus 2
acagtctgtaccgtctgcg

SEQ ID NO: 181 - DNA, 19 bp, Severe acute respiratory syndrome coronavirus 2
cagtctgtaccgtctgcgg

SEQ ID NO: 182 - DNA, 19 bp, Severe acute respiratory syndrome coronavirus 2
atgtggaaaggttatggct

SEQ ID NO: 183 - DNA, 19 bp, Severe acute respiratory syndrome coronavirus 2
tgtggaaaggttatggctg

SEQ ID NO: 184 - DNA, 19 bp, Severe acute respiratory syndrome coronavirus 2
gtggaaaggttatggctgt

SEQ ID NO: 185 - DNA, 19 bp, Severe acute respiratory syndrome coronavirus 2
tggaaaggttatggctgta

SEQ ID NO: 186 - DNA, 19 bp, Severe acute respiratory syndrome coronavirus 2
ggaaaggttatggctgtag

SEQ ID NO: 187 - DNA, 19 bp, Severe acute respiratory syndrome coronavirus 2
gaaaggttatggctgtagt

SEQ ID NO: 188 - DNA, 19 bp, Severe acute respiratory syndrome coronavirus 2
aaaggttatggctgtagtt

SEQ ID NO: 189 - DNA, 19 bp, Severe acute respiratory syndrome coronavirus 2
aaggttatggctgtagttg

SEQ ID NO: 190 - DNA, 19 bp, Severe acute respiratory syndrome coronavirus 2
aggttatggctgtagttgt

SEQ ID NO: 191 - DNA, 19 bp, Severe acute respiratory syndrome coronavirus 2
ggttatggctgtagttgtg

SEQ ID NO: 192 - DNA, 19 bp, Severe acute respiratory syndrome coronavirus 2
gttatggctgtagttgtga

SEQ ID NO: 193 - DNA, 19 bp, Severe acute respiratory syndrome coronavirus 2
cgtttttaaacgggtttgc

SEQ ID NO: 194 - DNA, 19 bp, Severe acute respiratory syndrome coronavirus 2
gtttttaaacgggtttgcg

SEQ ID NO: 195 - DNA, 19 bp, Severe acute respiratory syndrome coronavirus 2
tttttaaacgggtttgcgg

SEQ ID NO: 196 - DNA, 19 bp, Severe acute respiratory syndrome coronavirus 2
ttttaaacgggtttgcggt

SEQ ID NO: 197 - DNA, 19 bp, Severe acute respiratory syndrome coronavirus 2
tttaaacgggtttgcggtg

SEQ ID NO: 198 - DNA, 19 bp, Severe acute respiratory syndrome coronavirus 2
ttaaacgggtttgcggtgt

SEQ ID NO: 199 - DNA, 19 bp, Severe acute respiratory syndrome coronavirus 2
taaacgggtttgcggtgta

SEQ ID NO: 200 - DNA, 19 bp, Severe acute respiratory syndrome coronavirus 2
aaacgggtttgcggtgtaa

SEQ ID NO: 201 - DNA, 19 bp, Severe acute respiratory syndrome coronavirus 2
aacgggtttgcggtgtaag

SEQ ID NO: 202 - DNA, 19 bp, Severe acute respiratory syndrome coronavirus 2
acgggtttgcggtgtaagt

SEQ ID NO: 203 - DNA, 19 bp, Severe acute respiratory syndrome coronavirus 2
cgggtttgcggtgtaagtg

SEQ ID NO: 204 - DNA, 19 bp, Severe acute respiratory syndrome coronavirus 2
gggtttgcggtgtaagtgc

SEQ ID NO: 205 - DNA, 19 bp, Severe acute respiratory syndrome coronavirus 2
ggtttgcggtgtaagtgca

SEQ ID NO: 206 - DNA, 19 bp, Severe acute respiratory syndrome coronavirus 2
gtttgcggtgtaagtgcag

SEQ ID NO: 207 - DNA, 19 bp, Severe acute respiratory syndrome coronavirus 2
tttgcggtgtaagtgcagc

SEQ ID NO: 208 - DNA, 19 bp, Severe acute respiratory syndrome coronavirus 2
ttgcggtgtaagtgcagcc

SEQ ID NO: 209 - DNA, 19 bp, Severe acute respiratory syndrome coronavirus 2
tgcggtgtaagtgcagccc

SEQ ID NO: 210 - DNA, 19 bp, Severe acute respiratory syndrome coronavirus 2
gcggtgtaagtgcagcccg

SEQ ID NO: 211 - DNA, 19 bp, Severe acute respiratory syndrome coronavirus 2
cggtgtaagtgcagcccgt

SEQ ID NO: 212 - DNA, 19 bp, Severe acute respiratory syndrome coronavirus 2
ggtgtaagtgcagcccgtc

SEQ ID NO: 213 - DNA, 19 bp, Severe acute respiratory syndrome coronavirus 2
gtgtaagtgcagcccgtct

SEQ ID NO: 214 - DNA, 19 bp, Severe acute respiratory syndrome coronavirus 2
tgtaagtgcagcccgtctt

SEQ ID NO: 215 - DNA, 19 bp, Severe acute respiratory syndrome coronavirus 2
gtaagtgcagcccgtctta

SEQ ID NO: 216 - DNA, 19 bp, Severe acute respiratory syndrome coronavirus 2
taagtgcagcccgtcttac

SEQ ID NO: 217 - DNA, 19 bp, Severe acute respiratory syndrome coronavirus 2
aagtgcagcccgtcttaca

SEQ ID NO: 218 - DNA, 19 bp, Severe acute respiratory syndrome coronavirus 2
agtgcagcccgtcttacac

SEQ ID NO: 219 - DNA, 19 bp, Severe acute respiratory syndrome coronavirus 2
gtgcagcccgtcttacacc

SEQ ID NO: 220 - DNA, 19 bp, Severe acute respiratory syndrome coronavirus 2
tgcagcccgtcttacaccg

SEQ ID NO: 221 - DNA, 19 bp, Severe acute respiratory syndrome coronavirus 2
gcagcccgtcttacaccgt

SEQ ID NO: 222 - DNA, 19 bp, Severe acute respiratory syndrome coronavirus 2
cagcccgtcttacaccgtg

SEQ ID NO: 223 - DNA, 19 bp, Severe acute respiratory syndrome coronavirus 2
agcccgtcttacaccgtgc

SEQ ID NO: 224 - DNA, 19 bp, Severe acute respiratory syndrome coronavirus 2
gcccgtcttacaccgtgcg

SEQ ID NO: 225 - DNA, 19 bp, Severe acute respiratory syndrome coronavirus 2
cccgtcttacaccgtgcgg

SEQ ID NO: 226 - DNA, 19 bp, Severe acute respiratory syndrome coronavirus 2
ccgtcttacaccgtgcggc

SEQ ID NO: 227 - DNA, 19 bp, Severe acute respiratory syndrome coronavirus 2
cgtcttacaccgtgcggca

SEQ ID NO: 228 - DNA, 19 bp, Severe acute respiratory syndrome coronavirus 2
gtcttacaccgtgcggcac

SEQ ID NO: 229 - DNA, 19 bp, Severe acute respiratory syndrome coronavirus 2
tcttacaccgtgcggcaca

SEQ ID NO: 230 - DNA, 19 bp, Severe acute respiratory syndrome coronavirus 2
cttacaccgtgcggcacag

SEQ ID NO: 231 - DNA, 19 bp, Severe acute respiratory syndrome coronavirus 2
ttacaccgtgcggcacagg

SEQ ID NO: 232 - DNA, 19 bp, Severe acute respiratory syndrome coronavirus 2
tacaccgtgcggcacaggc

SEQ ID NO: 233 - DNA, 19 bp, Severe acute respiratory syndrome coronavirus 2
acaccgtgcggcacaggca

SEQ ID NO: 234 - DNA, 19 bp, Severe acute respiratory syndrome coronavirus 2
caccgtgcggcacaggcac

SEQ ID NO: 235 - DNA, 19 bp, Severe acute respiratory syndrome coronavirus 2
accgtgcggcacaggcact

SEQ ID NO: 236 - DNA, 19 bp, Severe acute respiratory syndrome coronavirus 2
ccgtgcggcacaggcacta

SEQ ID NO: 237 - DNA, 19 bp, Severe acute respiratory syndrome coronavirus 2
cgtgcggcacaggcactag

SEQ ID NO: 238 - DNA, 19 bp, Severe acute respiratory syndrome coronavirus 2
ggtgacatggtaccacata

SEQ ID NO: 239 - DNA, 19 bp, Severe acute respiratory syndrome coronavirus 2
gtgacatggtaccacatat

SEQ ID NO: 240 - DNA, 19 bp, Severe acute respiratory syndrome coronavirus 2
tgacatggtaccacatata

SEQ ID NO: 241 - DNA, 19 bp, Severe acute respiratory syndrome coronavirus 2
gacatggtaccacatatat

SEQ ID NO: 242 - DNA, 19 bp, Severe acute respiratory syndrome coronavirus 2
acatggtaccacatatatc

SEQ ID NO: 243 - DNA, 19 bp, Severe acute respiratory syndrome coronavirus 2
catggtaccacatatatca

SEQ ID NO: 244 - DNA, 19 bp, Severe acute respiratory syndrome coronavirus 2
atggtaccacatatatcac

SEQ ID NO: 245 - DNA, 19 bp, Severe acute respiratory syndrome coronavirus 2
tggtaccacatatatcacg

SEQ ID NO: 246 - DNA, 19 bp, Severe acute respiratory syndrome coronavirus 2
ggtaccacatatatcacgt

SEQ ID NO: 247 - DNA, 19 bp, Severe acute respiratory syndrome coronavirus 2
gtaccacatatatcacgtc

SEQ ID NO: 248 - DNA, 19 bp, Severe acute respiratory syndrome coronavirus 2
taccacatatatcacgtca

SEQ ID NO: 249 - DNA, 19 bp, Severe acute respiratory syndrome coronavirus 2
gaccgttattttaaatatt

SEQ ID NO: 250 - DNA, 19 bp, Severe acute respiratory syndrome coronavirus 2
accgttattttaaatattg

SEQ ID NO: 251 - DNA, 19 bp, Severe acute respiratory syndrome coronavirus 2
ccgttattttaaatattgg

SEQ ID NO: 252 - DNA, 19 bp, Severe acute respiratory syndrome coronavirus 2
cgttattttaaatattggg

SEQ ID NO: 253 - DNA, 19 bp, Severe acute respiratory syndrome coronavirus 2
gttattttaaatattggga

SEQ ID NO: 254 - DNA, 19 bp, Severe acute respiratory syndrome coronavirus 2
ccacctacaagttttggac

SEQ ID NO: 255 - DNA, 19 bp, Severe acute respiratory syndrome coronavirus 2
cacctacaagttttggacc

SEQ ID NO: 256 - DNA, 19 bp, Severe acute respiratory syndrome coronavirus 2
acctacaagttttggacca

SEQ ID NO: 257 - DNA, 19 bp, Severe acute respiratory syndrome coronavirus 2
cctacaagttttggaccac

SEQ ID NO: 258 - DNA, 19 bp, Severe acute respiratory syndrome coronavirus 2
ctacaagttttggaccact

SEQ ID NO: 259 - DNA, 19 bp, Severe acute respiratory syndrome coronavirus 2
tacaagttttggaccacta

SEQ ID NO: 260 - DNA, 19 bp, Severe acute respiratory syndrome coronavirus 2
acaagttttggaccactag

SEQ ID NO: 261 - DNA, 19 bp, Severe acute respiratory syndrome coronavirus 2
caagttttggaccactagt

SEQ ID NO: 262 - DNA, 19 bp, Severe acute respiratory syndrome coronavirus 2
gtacataatcaggatgtaa

SEQ ID NO: 263 - DNA, 19 bp, Severe acute respiratory syndrome coronavirus 2
tacataatcaggatgtaaa

SEQ ID NO: 264 - DNA, 19 bp, Severe acute respiratory syndrome coronavirus 2
acataatcaggatgtaaac

SEQ ID NO: 265 - DNA, 19 bp, Severe acute respiratory syndrome coronavirus 2
cataatcaggatgtaaact

SEQ ID NO: 266 - DNA, 19 bp, Severe acute respiratory syndrome coronavirus 2
ataatcaggatgtaaactt

SEQ ID NO: 267 - DNA, 19 bp, Severe acute respiratory syndrome coronavirus 2
taatcaggatgtaaactta

SEQ ID NO: 268 - DNA, 19 bp, Severe acute respiratory syndrome coronavirus 2
aatcaggatgtaaacttac

SEQ ID NO: 269 - DNA, 19 bp, Severe acute respiratory syndrome coronavirus 2
atcaggatgtaaacttaca

SEQ ID NO: 270 - DNA, 19 bp, Severe acute respiratory syndrome coronavirus 2
tcaggatgtaaacttacat

SEQ ID NO: 271 - DNA, 19 bp, Severe acute respiratory syndrome coronavirus 2
caggatgtaaacttacata

SEQ ID NO: 272 - DNA, 19 bp, Severe acute respiratory syndrome coronavirus 2
aggatgtaaacttacatag

SEQ ID NO: 273 - DNA, 19 bp, Severe acute respiratory syndrome coronavirus 2
ggatgtaaacttacatagc

SEQ ID NO: 274 - DNA, 19 bp, Severe acute respiratory syndrome coronavirus 2
gatgtaaacttacatagct

SEQ ID NO: 275 - DNA, 19 bp, Severe acute respiratory syndrome coronavirus 2
atgtaaacttacatagctc

SEQ ID NO: 276 - DNA, 19 bp, Severe acute respiratory syndrome coronavirus 2
tgcttttcagtagctgcac

SEQ ID NO: 277 - DNA, 19 bp, Severe acute respiratory syndrome coronavirus 2
gcttttcagtagctgcact

SEQ ID NO: 278 - DNA, 19 bp, Severe acute respiratory syndrome coronavirus 2
aatgttgcttttcaaactg

SEQ ID NO: 279 - DNA, 19 bp, Severe acute respiratory syndrome coronavirus 2
atgttgcttttcaaactgt

SEQ ID NO: 280 - DNA, 19 bp, Severe acute respiratory syndrome coronavirus 2
tgttgcttttcaaactgtc

SEQ ID NO: 281 - DNA, 19 bp, Severe acute respiratory syndrome coronavirus 2
gttgcttttcaaactgtca

SEQ ID NO: 282 - DNA, 19 bp, Severe acute respiratory syndrome coronavirus 2
ttgcttttcaaactgtcaa

SEQ ID NO: 283 - DNA, 19 bp, Severe acute respiratory syndrome coronavirus 2
tgcttttcaaactgtcaaa

SEQ ID NO: 284 - DNA, 19 bp, Severe acute respiratory syndrome coronavirus 2
gcttttcaaactgtcaaac

SEQ ID NO: 285 - DNA, 19 bp, Severe acute respiratory syndrome coronavirus 2
cttttcaaactgtcaaacc

SEQ ID NO: 286 - DNA, 19 bp, Severe acute respiratory syndrome coronavirus 2
ttttcaaactgtcaaaccc

SEQ ID NO: 287 - DNA, 19 bp, Severe acute respiratory syndrome coronavirus 2
tttcaaactgtcaaacccg

SEQ ID NO: 288 - DNA, 19 bp, Severe acute respiratory syndrome coronavirus 2
ttcaaactgtcaaacccgg

SEQ ID NO: 289 - DNA, 19 bp, Severe acute respiratory syndrome coronavirus 2
tcaaactgtcaaacccggt

SEQ ID NO: 290 - DNA, 19 bp, Severe acute respiratory syndrome coronavirus 2
caaactgtcaaacccggta

SEQ ID NO: 291 - DNA, 19 bp, Severe acute respiratory syndrome coronavirus 2
aaactgtcaaacccggtaa

SEQ ID NO: 292 - DNA, 19 bp, Severe acute respiratory syndrome coronavirus 2
aactgtcaaacccggtaat

SEQ ID NO: 293 - DNA, 19 bp, Severe acute respiratory syndrome coronavirus 2
actgtcaaacccggtaatt

SEQ ID NO: 294 - DNA, 19 bp, Severe acute respiratory syndrome coronavirus 2
ctgtcaaacccggtaattt

SEQ ID NO: 295 - DNA, 19 bp, Severe acute respiratory syndrome coronavirus 2
tgtcaaacccggtaatttt

SEQ ID NO: 296 - DNA, 19 bp, Severe acute respiratory syndrome coronavirus 2
gtcaaacccggtaatttta

SEQ ID NO: 297 - DNA, 19 bp, Severe acute respiratory syndrome coronavirus 2
tcaaacccggtaattttaa

SEQ ID NO: 298 - DNA, 19 bp, Severe acute respiratory syndrome coronavirus 2
tatgactttgctgtgtcta

SEQ ID NO: 299 - DNA, 19 bp, Severe acute respiratory syndrome coronavirus 2
atgactttgctgtgtctaa

SEQ ID NO: 300 - DNA, 19 bp, Severe acute respiratory syndrome coronavirus 2
ttctttaaggaaggaagtt

SEQ ID NO: 301 - DNA, 19 bp, Severe acute respiratory syndrome coronavirus 2
tctttaaggaaggaagttc

SEQ ID NO: 302 - DNA, 19 bp, Severe acute respiratory syndrome coronavirus 2
ctttaaggaaggaagttct

SEQ ID NO: 303 - DNA, 19 bp, Severe acute respiratory syndrome coronavirus 2
tttaaggaaggaagttctg

SEQ ID NO: 304 - DNA, 19 bp, Severe acute respiratory syndrome coronavirus 2
ttaaggaaggaagttctgt

SEQ ID NO: 305 - DNA, 19 bp, Severe acute respiratory syndrome coronavirus 2
taaggaaggaagttctgtt

SEQ ID NO: 306 - DNA, 19 bp, Severe acute respiratory syndrome coronavirus 2
aaggaaggaagttctgttg

SEQ ID NO: 307 - DNA, 19 bp, Severe acute respiratory syndrome coronavirus 2
aggaaggaagttctgttga

SEQ ID NO: 308 - DNA, 19 bp, Severe acute respiratory syndrome coronavirus 2
ggaaggaagttctgttgaa

SEQ ID NO: 309 - DNA, 19 bp, Severe acute respiratory syndrome coronavirus 2
taaaacacttcttctttgc

SEQ ID NO: 310 - DNA, 19 bp, Severe acute respiratory syndrome coronavirus 2
aaaacacttcttctttgct

SEQ ID NO: 311 - DNA, 19 bp, Severe acute respiratory syndrome coronavirus 2
aaacacttcttctttgctc

SEQ ID NO: 312 - DNA, 19 bp, Severe acute respiratory syndrome coronavirus 2
aacacttcttctttgctca

SEQ ID NO: 313 - DNA, 19 bp, Severe acute respiratory syndrome coronavirus 2
acacttcttctttgctcag

SEQ ID NO: 314 - DNA, 19 bp, Severe acute respiratory syndrome coronavirus 2
cacttcttctttgctcagg

SEQ ID NO: 315 - DNA, 19 bp, Severe acute respiratory syndrome coronavirus 2
acttcttctttgctcagga

SEQ ID NO: 316 - DNA, 19 bp, Severe acute respiratory syndrome coronavirus 2
cttcttctttgctcaggat

SEQ ID NO: 317 - DNA, 19 bp, Severe acute respiratory syndrome coronavirus 2
ttcttctttgctcaggatg

SEQ ID NO: 318 - DNA, 19 bp, Severe acute respiratory syndrome coronavirus 2
tcttctttgctcaggatgg

SEQ ID NO: 319 - DNA, 19 bp, Severe acute respiratory syndrome coronavirus 2
ccaacaatgtgtgatatca

SEQ ID NO: 320 - DNA, 19 bp, Severe acute respiratory syndrome coronavirus 2
caacaatgtgtgatatcag

SEQ ID NO: 321 - DNA, 19 bp, Severe acute respiratory syndrome coronavirus 2
aacaatgtgtgatatcaga

SEQ ID NO: 322 - DNA, 19 bp, Severe acute respiratory syndrome coronavirus 2
acaatgtgtgatatcagac

SEQ ID NO: 323 - DNA, 19 bp, Severe acute respiratory syndrome coronavirus 2
caatgtgtgatatcagaca

SEQ ID NO: 324 - DNA, 19 bp, Severe acute respiratory syndrome coronavirus 2
aatgtgtgatatcagacaa

SEQ ID NO: 325 - DNA, 19 bp, Severe acute respiratory syndrome coronavirus 2
atgtgtgatatcagacaac

SEQ ID NO: 326 - DNA, 19 bp, Severe acute respiratory syndrome coronavirus 2
tgtgtgatatcagacaact

SEQ ID NO: 327 - DNA, 19 bp, Severe acute respiratory syndrome coronavirus 2
gtagttgaagttgttgata

SEQ ID NO: 328 - DNA, 19 bp, Severe acute respiratory syndrome coronavirus 2
tagttgaagttgttgataa

SEQ ID NO: 329 - DNA, 19 bp, Severe acute respiratory syndrome coronavirus 2
tactttgattgttacgatg

SEQ ID NO: 330 - DNA, 19 bp, Severe acute respiratory syndrome coronavirus 2
actttgattgttacgatgg

SEQ ID NO: 331 - DNA, 19 bp, Severe acute respiratory syndrome coronavirus 2
ctttgattgttacgatggt

SEQ ID NO: 332 - DNA, 19 bp, Severe acute respiratory syndrome coronavirus 2
tttgattgttacgatggtg

SEQ ID NO: 333 - DNA, 19 bp, Severe acute respiratory syndrome coronavirus 2
ttgattgttacgatggtgg

SEQ ID NO: 334 - DNA, 19 bp, Severe acute respiratory syndrome coronavirus 2
tgattgttacgatggtggc

SEQ ID NO: 335 - DNA, 19 bp, Severe acute respiratory syndrome coronavirus 2
gattgttacgatggtggct

SEQ ID NO: 336 - DNA, 19 bp, Severe acute respiratory syndrome coronavirus 2
attgttacgatggtggctg

SEQ ID NO: 337 - DNA, 19 bp, Severe acute respiratory syndrome coronavirus 2
ttgttacgatggtggctgt

SEQ ID NO: 338 - DNA, 19 bp, Severe acute respiratory syndrome coronavirus 2
tgttacgatggtggctgta

SEQ ID NO: 339 - DNA, 19 bp, Severe acute respiratory syndrome coronavirus 2
gttacgatggtggctgtat

SEQ ID NO: 340 - DNA, 19 bp, Severe acute respiratory syndrome coronavirus 2
aaatggggtaaggctagac

SEQ ID NO: 341 - DNA, 19 bp, Severe acute respiratory syndrome coronavirus 2
aatggggtaaggctagact

SEQ ID NO: 342 - DNA, 19 bp, Severe acute respiratory syndrome coronavirus 2
atggggtaaggctagactt

SEQ ID NO: 343 - DNA, 19 bp, Severe acute respiratory syndrome coronavirus 2
tggggtaaggctagacttt

SEQ ID NO: 344 - DNA, 19 bp, Severe acute respiratory syndrome coronavirus 2
ggggtaaggctagacttta

SEQ ID NO: 345 - DNA, 19 bp, Severe acute respiratory syndrome coronavirus 2
gggtaaggctagactttat

SEQ ID NO: 346 - DNA, 19 bp, Severe acute respiratory syndrome coronavirus 2
ggtaaggctagactttatt

SEQ ID NO: 347 - DNA, 19 bp, Severe acute respiratory syndrome coronavirus 2
gtaaggctagactttatta

SEQ ID NO: 348 - DNA, 19 bp, Severe acute respiratory syndrome coronavirus 2
taaggctagactttattat

SEQ ID NO: 349 - DNA, 19 bp, Severe acute respiratory syndrome coronavirus 2
aaggctagactttattatg

SEQ ID NO: 350 - DNA, 19 bp, Severe acute respiratory syndrome coronavirus 2
aggctagactttattatga

SEQ ID NO: 351 - DNA, 19 bp, Severe acute respiratory syndrome coronavirus 2
tcaatgagttatgaggatc

SEQ ID NO: 352 - DNA, 19 bp, Severe acute respiratory syndrome coronavirus 2
caatgagttatgaggatca

SEQ ID NO: 353 - DNA, 19 bp, Severe acute respiratory syndrome coronavirus 2
aatgagttatgaggatcaa

SEQ ID NO: 354 - DNA, 19 bp, Severe acute respiratory syndrome coronavirus 2
atgagttatgaggatcaag

SEQ ID NO: 355 - DNA, 19 bp, Severe acute respiratory syndrome coronavirus 2
tgagttatgaggatcaaga

SEQ ID NO: 356 - DNA, 19 bp, Severe acute respiratory syndrome coronavirus 2
gagttatgaggatcaagat

SEQ ID NO: 357 - DNA, 19 bp, Severe acute respiratory syndrome coronavirus 2
agttatgaggatcaagatg

SEQ ID NO: 358 - DNA, 19 bp, Severe acute respiratory syndrome coronavirus 2
gttatgaggatcaagatgc

SEQ ID NO: 359 - DNA, 19 bp, Severe acute respiratory syndrome coronavirus 2
ttatgaggatcaagatgca

SEQ ID NO: 360 - DNA, 19 bp, Severe acute respiratory syndrome coronavirus 2
tatgaggatcaagatgcac

SEQ ID NO: 361 - DNA, 19 bp, Severe acute respiratory syndrome coronavirus 2
atgaggatcaagatgcact

SEQ ID NO: 362 - DNA, 19 bp, Severe acute respiratory syndrome coronavirus 2
ataactcaaatgaatctta

SEQ ID NO: 363 - DNA, 19 bp, Severe acute respiratory syndrome coronavirus 2
taactcaaatgaatcttaa

SEQ ID NO: 364 - DNA, 19 bp, Severe acute respiratory syndrome coronavirus 2
aactcaaatgaatcttaag

SEQ ID NO: 365 - DNA, 19 bp, Severe acute respiratory syndrome coronavirus 2
actcaaatgaatcttaagt

SEQ ID NO: 366 - DNA, 19 bp, Severe acute respiratory syndrome coronavirus 2
ctcaaatgaatcttaagta

SEQ ID NO: 367 - DNA, 19 bp, Severe acute respiratory syndrome coronavirus 2
tcaaatgaatcttaagtat

SEQ ID NO: 368 - DNA, 19 bp, Severe acute respiratory syndrome coronavirus 2
caaatgaatcttaagtatg

SEQ ID NO: 369 - DNA, 19 bp, Severe acute respiratory syndrome coronavirus 2
aaatgaatcttaagtatgc

SEQ ID NO: 370 - DNA, 19 bp, Severe acute respiratory syndrome coronavirus 2
aatgaatcttaagtatgcc

SEQ ID NO: 371 - DNA, 19 bp, Severe acute respiratory syndrome coronavirus 2
atgaatcttaagtatgcca

SEQ ID NO: 372 - DNA, 19 bp, Severe acute respiratory syndrome coronavirus 2
tgaatcttaagtatgccat

SEQ ID NO: 373 - DNA, 19 bp, Severe acute respiratory syndrome coronavirus 2
gaatcttaagtatgccatt

SEQ ID NO: 374 - DNA, 19 bp, Severe acute respiratory syndrome coronavirus 2
aatcttaagtatgccatta

SEQ ID NO: 375 - DNA, 19 bp, Severe acute respiratory syndrome coronavirus 2
atcttaagtatgccattag

SEQ ID NO: 376 - DNA, 19 bp, Severe acute respiratory syndrome coronavirus 2
tcttaagtatgccattagt

SEQ ID NO: 377 - DNA, 19 bp, Severe acute respiratory syndrome coronavirus 2
cttaagtatgccattagtg

SEQ ID NO: 378 - DNA, 19 bp, Severe acute respiratory syndrome coronavirus 2
ttaagtatgccattagtgc

SEQ ID NO: 379 - DNA, 19 bp, Severe acute respiratory syndrome coronavirus 2
taagtatgccattagtgca

SEQ ID NO: 380 - DNA, 19 bp, Severe acute respiratory syndrome coronavirus 2
aagtatgccattagtgcaa

SEQ ID NO: 381 - DNA, 19 bp, Severe acute respiratory syndrome coronavirus 2
agtatgccattagtgcaaa

SEQ ID NO: 382 - DNA, 19 bp, Severe acute respiratory syndrome coronavirus 2
gtatgccattagtgcaaag

SEQ ID NO: 383 - DNA, 19 bp, Severe acute respiratory syndrome coronavirus 2
tatgccattagtgcaaaga

SEQ ID NO: 384 - DNA, 19 bp, Severe acute respiratory syndrome coronavirus 2
atgccattagtgcaaagaa

SEQ ID NO: 385 - DNA, 19 bp, Severe acute respiratory syndrome coronavirus 2
tgccattagtgcaaagaat

SEQ ID NO: 386 - DNA, 19 bp, Severe acute respiratory syndrome coronavirus 2
gccattagtgcaaagaata

SEQ ID NO: 387 - DNA, 19 bp, Severe acute respiratory syndrome coronavirus 2
ccattagtgcaaagaatag

SEQ ID NO: 388 - DNA, 19 bp, Severe acute respiratory syndrome coronavirus 2
cattagtgcaaagaataga

SEQ ID NO: 389 - DNA, 19 bp, Severe acute respiratory syndrome coronavirus 2
attagtgcaaagaatagag

SEQ ID NO: 390 - DNA, 19 bp, Severe acute respiratory syndrome coronavirus 2
ttagtgcaaagaatagagc

SEQ ID NO: 391 - DNA, 19 bp, Severe acute respiratory syndrome coronavirus 2
tagtgcaaagaatagagct

SEQ ID NO: 392 - DNA, 19 bp, Severe acute respiratory syndrome coronavirus 2
agtgcaaagaatagagctc

SEQ ID NO: 393 - DNA, 19 bp, Severe acute respiratory syndrome coronavirus 2
gtgcaaagaatagagctcg

SEQ ID NO: 394 - DNA, 19 bp, Severe acute respiratory syndrome coronavirus 2
tgcaaagaatagagctcgc

SEQ ID NO: 395 - DNA, 19 bp, Severe acute respiratory syndrome coronavirus 2
gcaaagaatagagctcgca

SEQ ID NO: 396 - DNA, 19 bp, Severe acute respiratory syndrome coronavirus 2
caaagaatagagctcgcac

SEQ ID NO: 397 - DNA, 19 bp, Severe acute respiratory syndrome coronavirus 2
aaagaatagagctcgcacc

SEQ ID NO: 398 - DNA, 19 bp, Severe acute respiratory syndrome coronavirus 2
aagaatagagctcgcaccg

SEQ ID NO: 399 - DNA, 19 bp, Severe acute respiratory syndrome coronavirus 2
agaatagagctcgcaccgt

SEQ ID NO: 400 - DNA, 19 bp, Severe acute respiratory syndrome coronavirus 2
gaatagagctcgcaccgta

SEQ ID NO: 401 - DNA, 19 bp, Severe acute respiratory syndrome coronavirus 2
aatagagctcgcaccgtag

SEQ ID NO: 402 - DNA, 19 bp, Severe acute respiratory syndrome coronavirus 2
atagagctcgcaccgtagc

SEQ ID NO: 403 - DNA, 19 bp, Severe acute respiratory syndrome coronavirus 2
tagagctcgcaccgtagct

SEQ ID NO: 404 - DNA, 19 bp, Severe acute respiratory syndrome coronavirus 2
agagctcgcaccgtagctg

SEQ ID NO: 405 - DNA, 19 bp, Severe acute respiratory syndrome coronavirus 2
gagctcgcaccgtagctgg

SEQ ID NO: 406 - DNA, 19 bp, Severe acute respiratory syndrome coronavirus 2
agctcgcaccgtagctggt

SEQ ID NO: 407 - DNA, 19 bp, Severe acute respiratory syndrome coronavirus 2
gctcgcaccgtagctggtg

SEQ ID NO: 408 - DNA, 19 bp, Severe acute respiratory syndrome coronavirus 2
ctcgcaccgtagctggtgt

SEQ ID NO: 409 - DNA, 19 bp, Severe acute respiratory syndrome coronavirus 2
tcgcaccgtagctggtgtc

SEQ ID NO: 410 - DNA, 19 bp, Severe acute respiratory syndrome coronavirus 2
cgcaccgtagctggtgtct

SEQ ID NO: 411 - DNA, 19 bp, Severe acute respiratory syndrome coronavirus 2
gcaccgtagctggtgtctc

SEQ ID NO: 412 - DNA, 19 bp, Severe acute respiratory syndrome coronavirus 2
caccgtagctggtgtctct

SEQ ID NO: 413 - DNA, 19 bp, Severe acute respiratory syndrome coronavirus 2
accgtagctggtgtctcta

SEQ ID NO: 414 - DNA, 19 bp, Severe acute respiratory syndrome coronavirus 2
ccgtagctggtgtctctat

SEQ ID NO: 415 - DNA, 19 bp, Severe acute respiratory syndrome coronavirus 2
cgtagctggtgtctctatc

SEQ ID NO: 416 - DNA, 19 bp, Severe acute respiratory syndrome coronavirus 2
gtagctggtgtctctatct

SEQ ID NO: 417 - DNA, 19 bp, Severe acute respiratory syndrome coronavirus 2
tagctggtgtctctatctg

SEQ ID NO: 418 - DNA, 19 bp, Severe acute respiratory syndrome coronavirus 2
agctggtgtctctatctgt

SEQ ID NO: 419 - DNA, 19 bp, Severe acute respiratory syndrome coronavirus 2
gctggtgtctctatctgta

SEQ ID NO: 420 - DNA, 19 bp, Severe acute respiratory syndrome coronavirus 2
ctggtgtctctatctgtag

SEQ ID NO: 421 - DNA, 19 bp, Severe acute respiratory syndrome coronavirus 2
tggtgtctctatctgtagt

SEQ ID NO: 422 - DNA, 19 bp, Severe acute respiratory syndrome coronavirus 2
ggtgtctctatctgtagta

SEQ ID NO: 423 - DNA, 19 bp, Severe acute respiratory syndrome coronavirus 2
gtgtctctatctgtagtac

SEQ ID NO: 424 - DNA, 19 bp, Severe acute respiratory syndrome coronavirus 2
tgtctctatctgtagtact

SEQ ID NO: 425 - DNA, 19 bp, Severe acute respiratory syndrome coronavirus 2
gtctctatctgtagtacta

SEQ ID NO: 426 - DNA, 19 bp, Severe acute respiratory syndrome coronavirus 2
tctctatctgtagtactat

SEQ ID NO: 427 - DNA, 19 bp, Severe acute respiratory syndrome coronavirus 2
ctctatctgtagtactatg

SEQ ID NO: 428 - DNA, 19 bp, Severe acute respiratory syndrome coronavirus 2
tctatctgtagtactatga

SEQ ID NO: 429 - DNA, 19 bp, Severe acute respiratory syndrome coronavirus 2
ctatctgtagtactatgac

SEQ ID NO: 430 - DNA, 19 bp, Severe acute respiratory syndrome coronavirus 2
tcaatagccgccactagag

SEQ ID NO: 431 - DNA, 19 bp, Severe acute respiratory syndrome coronavirus 2
caatagccgccactagagg

SEQ ID NO: 432 - DNA, 19 bp, Severe acute respiratory syndrome coronavirus 2
aatagccgccactagagga

SEQ ID NO: 433 - DNA, 19 bp, Severe acute respiratory syndrome coronavirus 2
atagccgccactagaggag

SEQ ID NO: 434 - DNA, 19 bp, Severe acute respiratory syndrome coronavirus 2
tagccgccactagaggagc

SEQ ID NO: 435 - DNA, 19 bp, Severe acute respiratory syndrome coronavirus 2
agccgccactagaggagct

SEQ ID NO: 436 - DNA, 19 bp, Severe acute respiratory syndrome coronavirus 2
gccgccactagaggagcta

SEQ ID NO: 437 - DNA, 19 bp, Severe acute respiratory syndrome coronavirus 2
ccgccactagaggagctac

SEQ ID NO: 438 - DNA, 19 bp, Severe acute respiratory syndrome coronavirus 2
cgccactagaggagctact

SEQ ID NO: 439 - DNA, 19 bp, Severe acute respiratory syndrome coronavirus 2
gccactagaggagctactg

SEQ ID NO: 440 - DNA, 19 bp, Severe acute respiratory syndrome coronavirus 2
ccactagaggagctactgt

SEQ ID NO: 441 - DNA, 19 bp, Severe acute respiratory syndrome coronavirus 2
agagccatgcctaacatgc

SEQ ID NO: 442 - DNA, 19 bp, Severe acute respiratory syndrome coronavirus 2
gagccatgcctaacatgct

SEQ ID NO: 443 - DNA, 19 bp, Severe acute respiratory syndrome coronavirus 2
agccatgcctaacatgctt

SEQ ID NO: 444 - DNA, 19 bp, Severe acute respiratory syndrome coronavirus 2
gccatgcctaacatgctta

SEQ ID NO: 445 - DNA, 19 bp, Severe acute respiratory syndrome coronavirus 2
ccatgcctaacatgcttag

SEQ ID NO: 446 - DNA, 19 bp, Severe acute respiratory syndrome coronavirus 2
cttgttcttgctcgcaaac

SEQ ID NO: 447 - DNA, 19 bp, Severe acute respiratory syndrome coronavirus 2
ttgttcttgctcgcaaaca

SEQ ID NO: 448 - DNA, 19 bp, Severe acute respiratory syndrome coronavirus 2
tgttcttgctcgcaaacat

SEQ ID NO: 449 - DNA, 19 bp, Severe acute respiratory syndrome coronavirus 2
gttcttgctcgcaaacata

SEQ ID NO: 450 - DNA, 19 bp, Severe acute respiratory syndrome coronavirus 2
acaactgcttatgctaata

SEQ ID NO: 451 - DNA, 19 bp, Severe acute respiratory syndrome coronavirus 2
caactgcttatgctaatag

SEQ ID NO: 452 - DNA, 19 bp, Severe acute respiratory syndrome coronavirus 2
aactgcttatgctaatagt

SEQ ID NO: 453 - DNA, 19 bp, Severe acute respiratory syndrome coronavirus 2
actgcttatgctaatagtg

SEQ ID NO: 454 - DNA, 19 bp, Severe acute respiratory syndrome coronavirus 2
ctgcttatgctaatagtgt

SEQ ID NO: 455 - DNA, 19 bp, Severe acute respiratory syndrome coronavirus 2
tatgagtgtctctatagaa

SEQ ID NO: 456 - DNA, 19 bp, Severe acute respiratory syndrome coronavirus 2
atgagtgtctctatagaaa

SEQ ID NO: 457 - DNA, 19 bp, Severe acute respiratory syndrome coronavirus 2
tgagtgtctctatagaaat

SEQ ID NO: 458 - DNA, 19 bp, Severe acute respiratory syndrome coronavirus 2
gagtgtctctatagaaata

SEQ ID NO: 459 - DNA, 19 bp, Severe acute respiratory syndrome coronavirus 2
agtgtctctatagaaatag

SEQ ID NO: 460 - DNA, 19 bp, Severe acute respiratory syndrome coronavirus 2
tggactgagactgacctta

SEQ ID NO: 461 - DNA, 19 bp, Severe acute respiratory syndrome coronavirus 2
ggactgagactgaccttac

SEQ ID NO: 462 - DNA, 19 bp, Severe acute respiratory syndrome coronavirus 2
gactgagactgaccttact

SEQ ID NO: 463 - DNA, 19 bp, Severe acute respiratory syndrome coronavirus 2
actgagactgaccttacta

SEQ ID NO: 464 - DNA, 19 bp, Severe acute respiratory syndrome coronavirus 2
ctgagactgaccttactaa

SEQ ID NO: 465 - DNA, 19 bp, Severe acute respiratory syndrome coronavirus 2
tgagactgaccttactaaa

SEQ ID NO: 466 - DNA, 19 bp, Severe acute respiratory syndrome coronavirus 2
gagactgaccttactaaag

SEQ ID NO: 467 - DNA, 19 bp, Severe acute respiratory syndrome coronavirus 2
agactgaccttactaaagg

SEQ ID NO: 468 - DNA, 19 bp, Severe acute respiratory syndrome coronavirus 2
gactgaccttactaaagga

SEQ ID NO: 469 - DNA, 19 bp, Severe acute respiratory syndrome coronavirus 2
actgaccttactaaaggac

SEQ ID NO: 470 - DNA, 19 bp, Severe acute respiratory syndrome coronavirus 2
ctgaccttactaaaggacc

SEQ ID NO: 471 - DNA, 19 bp, Severe acute respiratory syndrome coronavirus 2
tgaccttactaaaggacct

SEQ ID NO: 472 - DNA, 19 bp, Severe acute respiratory syndrome coronavirus 2
gaccttactaaaggacctc

SEQ ID NO: 473 - DNA, 19 bp, Severe acute respiratory syndrome coronavirus 2
accttactaaaggacctca

SEQ ID NO: 474 - DNA, 19 bp, Severe acute respiratory syndrome coronavirus 2
catacaatgctagttaaac

SEQ ID NO: 475 - DNA, 19 bp, Severe acute respiratory syndrome coronavirus 2
atacaatgctagttaaaca

SEQ ID NO: 476 - DNA, 19 bp, Severe acute respiratory syndrome coronavirus 2
aaaacagatggtacactta

SEQ ID NO: 477 - DNA, 19 bp, Severe acute respiratory syndrome coronavirus 2
aaacagatggtacacttat

SEQ ID NO: 478 - DNA, 19 bp, Severe acute respiratory syndrome coronavirus 2
aacagatggtacacttatg

SEQ ID NO: 479 - DNA, 19 bp, Severe acute respiratory syndrome coronavirus 2
acagatggtacacttatga

SEQ ID NO: 480 - DNA, 19 bp, Severe acute respiratory syndrome coronavirus 2
cagatggtacacttatgat

SEQ ID NO: 481 - DNA, 19 bp, Severe acute respiratory syndrome coronavirus 2
agatggtacacttatgatt

SEQ ID NO: 482 - DNA, 19 bp, Severe acute respiratory syndrome coronavirus 2
gatggtacacttatgattg

SEQ ID NO: 483 - DNA, 19 bp, Severe acute respiratory syndrome coronavirus 2
atggtacacttatgattga

SEQ ID NO: 484 - DNA, 19 bp, Severe acute respiratory syndrome coronavirus 2
cctaatcaggagtatgctg

SEQ ID NO: 485 - DNA, 19 bp, Severe acute respiratory syndrome coronavirus 2
ctaatcaggagtatgctga

SEQ ID NO: 486 - DNA, 19 bp, Severe acute respiratory syndrome coronavirus 2
taatcaggagtatgctgat

SEQ ID NO: 487 - DNA, 19 bp, Severe acute respiratory syndrome coronavirus 2
aatcaggagtatgctgatg

SEQ ID NO: 488 - DNA, 19 bp, Severe acute respiratory syndrome coronavirus 2
atcaggagtatgctgatgt

SEQ ID NO: 489 - DNA, 19 bp, Severe acute respiratory syndrome coronavirus 2
tgggaacctgagttttatg

SEQ ID NO: 490 - DNA, 19 bp, Severe acute respiratory syndrome coronavirus 2
gggaacctgagttttatga

SEQ ID NO: 491 - DNA, 19 bp, Severe acute respiratory syndrome coronavirus 2
taggaggtatgagctatta

SEQ ID NO: 492 - DNA, 19 bp, Severe acute respiratory syndrome coronavirus 2
ggagagtacacctttgaaa

SEQ ID NO: 493 - DNA, 19 bp, Severe acute respiratory syndrome coronavirus 2
gagagtacacctttgaaaa

SEQ ID NO: 494 - DNA, 19 bp, Severe acute respiratory syndrome coronavirus 2
agagtacacctttgaaaaa

SEQ ID NO: 495 - DNA, 19 bp, Severe acute respiratory syndrome coronavirus 2
gagtacacctttgaaaaag

SEQ ID NO: 496 - DNA, 19 bp, Severe acute respiratory syndrome coronavirus 2
agtacacctttgaaaaagg

SEQ ID NO: 497 - DNA, 19 bp, Severe acute respiratory syndrome coronavirus 2
gtacacctttgaaaaaggt

SEQ ID NO: 498 - DNA, 19 bp, Severe acute respiratory syndrome coronavirus 2
tacacctttgaaaaaggtg

SEQ ID NO: 499 - DNA, 19 bp, Severe acute respiratory syndrome coronavirus 2
acacctttgaaaaaggtga

SEQ ID NO: 500 - DNA, 19 bp, Severe acute respiratory syndrome coronavirus 2
cacctttgaaaaaggtgac

SEQ ID NO: 501 - DNA, 19 bp, Severe acute respiratory syndrome coronavirus 2
acctttgaaaaaggtgact

SEQ ID NO: 502 - DNA, 19 bp, Severe acute respiratory syndrome coronavirus 2
cctttgaaaaaggtgacta

SEQ ID NO: 503 - DNA, 19 bp, Severe acute respiratory syndrome coronavirus 2
ctttgaaaaaggtgactat

SEQ ID NO: 504 - DNA, 19 bp, Severe acute respiratory syndrome coronavirus 2
tttgaaaaaggtgactatg

SEQ ID NO: 505 - DNA, 19 bp, Severe acute respiratory syndrome coronavirus 2
ttgaaaaaggtgactatgg

SEQ ID NO: 506 - DNA, 19 bp, Severe acute respiratory syndrome coronavirus 2
tgaaaaaggtgactatggt

SEQ ID NO: 507 - DNA, 19 bp, Severe acute respiratory syndrome coronavirus 2
gaaaaaggtgactatggtg

SEQ ID NO: 508 - DNA, 19 bp, Severe acute respiratory syndrome coronavirus 2
aaaaaggtgactatggtga

SEQ ID NO: 509 - DNA, 19 bp, Severe acute respiratory syndrome coronavirus 2
aaaaggtgactatggtgat

SEQ ID NO: 510 - DNA, 19 bp, Severe acute respiratory syndrome coronavirus 2
aaaggtgactatggtgatg

SEQ ID NO: 511 - DNA, 19 bp, Severe acute respiratory syndrome coronavirus 2
aaggtgactatggtgatgc

SEQ ID NO: 512 - DNA, 19 bp, Severe acute respiratory syndrome coronavirus 2
aggtgactatggtgatgct

SEQ ID NO: 513 - DNA, 19 bp, Severe acute respiratory syndrome coronavirus 2
ggtgactatggtgatgctg

SEQ ID NO: 514 - DNA, 19 bp, Severe acute respiratory syndrome coronavirus 2
gtgactatggtgatgctgt

SEQ ID NO: 515 - DNA, 19 bp, Severe acute respiratory syndrome coronavirus 2
tgactatggtgatgctgtt

SEQ ID NO: 516 - DNA, 19 bp, Severe acute respiratory syndrome coronavirus 2
gactatggtgatgctgttg

SEQ ID NO: 517 - DNA, 19 bp, Severe acute respiratory syndrome coronavirus 2
actatggtgatgctgttgt

SEQ ID NO: 518 - DNA, 19 bp, Severe acute respiratory syndrome coronavirus 2
ctagtgccacaagagcact

SEQ ID NO: 519 - DNA, 19 bp, Severe acute respiratory syndrome coronavirus 2
tagtgccacaagagcacta

SEQ ID NO: 520 - DNA, 19 bp, Severe acute respiratory syndrome coronavirus 2
agtgccacaagagcactat

SEQ ID NO: 521 - DNA, 19 bp, Severe acute respiratory syndrome coronavirus 2
gtgccacaagagcactatg

SEQ ID NO: 522 - DNA, 19 bp, Severe acute respiratory syndrome coronavirus 2
tgccacaagagcactatgt

SEQ ID NO: 523 - DNA, 19 bp, Severe acute respiratory syndrome coronavirus 2
atctcagatgagttttcta

SEQ ID NO: 524 - DNA, 19 bp, Severe acute respiratory syndrome coronavirus 2
tctcagatgagttttctag

SEQ ID NO: 525 - DNA, 19 bp, Severe acute respiratory syndrome coronavirus 2
ctcagatgagttttctagc

SEQ ID NO: 526 - DNA, 19 bp, Severe acute respiratory syndrome coronavirus 2
tcagatgagttttctagca

SEQ ID NO: 527 - DNA, 19 bp, Severe acute respiratory syndrome coronavirus 2
cagatgagttttctagcaa

SEQ ID NO: 528 - DNA, 19 bp, Severe acute respiratory syndrome coronavirus 2
agatgagttttctagcaat

SEQ ID NO: 529 - DNA, 19 bp, Severe acute respiratory syndrome coronavirus 2
gatgagttttctagcaatg

SEQ ID NO: 530 - DNA, 19 bp, Severe acute respiratory syndrome coronavirus 2
atgagttttctagcaatgt

SEQ ID NO: 531 - DNA, 19 bp, Severe acute respiratory syndrome coronavirus 2
tgagttttctagcaatgtt

SEQ ID NO: 532 - DNA, 19 bp, Severe acute respiratory syndrome coronavirus 2
gagttttctagcaatgttg

SEQ ID NO: 533 - DNA, 19 bp, Severe acute respiratory syndrome coronavirus 2
agttttctagcaatgttgc

SEQ ID NO: 534 - DNA, 19 bp, Severe acute respiratory syndrome coronavirus 2
gttttctagcaatgttgca

SEQ ID NO: 535 - DNA, 19 bp, Severe acute respiratory syndrome coronavirus 2
ttttctagcaatgttgcaa

SEQ ID NO: 536 - DNA, 19 bp, Severe acute respiratory syndrome coronavirus 2
tttctagcaatgttgcaaa

SEQ ID NO: 537 - DNA, 19 bp, Severe acute respiratory syndrome coronavirus 2
ttctagcaatgttgcaaat

SEQ ID NO: 538 - DNA, 19 bp, Severe acute respiratory syndrome coronavirus 2
tctagcaatgttgcaaatt

SEQ ID NO: 539 - DNA, 19 bp, Severe acute respiratory syndrome coronavirus 2
ctagcaatgttgcaaatta

SEQ ID NO: 540 - DNA, 19 bp, Severe acute respiratory syndrome coronavirus 2
ggaccacctggtactggta

SEQ ID NO: 541 - DNA, 19 bp, Severe acute respiratory syndrome coronavirus 2
gaccacctggtactggtaa

SEQ ID NO: 542 - DNA, 19 bp, Severe acute respiratory syndrome coronavirus 2
accacctggtactggtaag

SEQ ID NO: 543 - DNA, 19 bp, Severe acute respiratory syndrome coronavirus 2
ccacctggtactggtaaga

SEQ ID NO: 544 - DNA, 19 bp, Severe acute respiratory syndrome coronavirus 2
cacctggtactggtaagag

SEQ ID NO: 545 - DNA, 19 bp, Severe acute respiratory syndrome coronavirus 2
acctggtactggtaagagt

SEQ ID NO: 546 - DNA, 19 bp, Severe acute respiratory syndrome coronavirus 2
cctggtactggtaagagtc

SEQ ID NO: 547 - DNA, 19 bp, Severe acute respiratory syndrome coronavirus 2
ctggtactggtaagagtca

SEQ ID NO: 548 - DNA, 19 bp, Severe acute respiratory syndrome coronavirus 2
tggtactggtaagagtcat

SEQ ID NO: 549 - DNA, 19 bp, Severe acute respiratory syndrome coronavirus 2
ggtactggtaagagtcatt

SEQ ID NO: 550 - DNA, 19 bp, Severe acute respiratory syndrome coronavirus 2
gtactggtaagagtcattt

SEQ ID NO: 551 - DNA, 19 bp, Severe acute respiratory syndrome coronavirus 2
tactggtaagagtcatttt

SEQ ID NO: 552 - DNA, 19 bp, Severe acute respiratory syndrome coronavirus 2
actggtaagagtcattttg

SEQ ID NO: 553 - DNA, 19 bp, Severe acute respiratory syndrome coronavirus 2
ctggtaagagtcattttgc

SEQ ID NO: 554 - DNA, 19 bp, Severe acute respiratory syndrome coronavirus 2
tctgctcgcatagtgtata

SEQ ID NO: 555 - DNA, 19 bp, Severe acute respiratory syndrome coronavirus 2
ctgctcgcatagtgtatac

SEQ ID NO: 556 - DNA, 19 bp, Severe acute respiratory syndrome coronavirus 2
aaattcaaagtgaattcaa

SEQ ID NO: 557 - DNA, 19 bp, Severe acute respiratory syndrome coronavirus 2
aattcaaagtgaattcaac

SEQ ID NO: 558 - DNA, 19 bp, Severe acute respiratory syndrome coronavirus 2
attcaaagtgaattcaaca

SEQ ID NO: 559 - DNA, 19 bp, Severe acute respiratory syndrome coronavirus 2
ataggtccagacatgttcc

SEQ ID NO: 560 - DNA, 19 bp, Severe acute respiratory syndrome coronavirus 2
taggtccagacatgttcct

SEQ ID NO: 561 - DNA, 19 bp, Severe acute respiratory syndrome coronavirus 2
cgttgtcctgctgaaattg

SEQ ID NO: 562 - DNA, 19 bp, Severe acute respiratory syndrome coronavirus 2
gttgtcctgctgaaattgt

SEQ ID NO: 563 - DNA, 19 bp, Severe acute respiratory syndrome coronavirus 2
catgatgtttcatctgcaa

SEQ ID NO: 564 - DNA, 19 bp, Severe acute respiratory syndrome coronavirus 2
atgatgtttcatctgcaat

SEQ ID NO: 565 - DNA, 19 bp, Severe acute respiratory syndrome coronavirus 2
cctgcttggagaaaagctg

SEQ ID NO: 566 - DNA, 19 bp, Severe acute respiratory syndrome coronavirus 2
ctgcttggagaaaagctgt

SEQ ID NO: 567 - DNA, 19 bp, Severe acute respiratory syndrome coronavirus 2
tatgactatgtcatattca

SEQ ID NO: 568 - DNA, 19 bp, Severe acute respiratory syndrome coronavirus 2
atgactatgtcatattcac

SEQ ID NO: 569 - DNA, 19 bp, Severe acute respiratory syndrome coronavirus 2
tgcataatgtctgatagag

SEQ ID NO: 570 - DNA, 19 bp, Severe acute respiratory syndrome coronavirus 2
gcataatgtctgatagaga

SEQ ID NO: 571 - DNA, 19 bp, Severe acute respiratory syndrome coronavirus 2
acacaggcacctacacacc

SEQ ID NO: 572 - DNA, 19 bp, Severe acute respiratory syndrome coronavirus 2
cacaggcacctacacacct

SEQ ID NO: 573 - DNA, 19 bp, Severe acute respiratory syndrome coronavirus 2
acaggcacctacacacctc

SEQ ID NO: 574 - DNA, 19 bp, Severe acute respiratory syndrome coronavirus 2
caggcacctacacacctca

SEQ ID NO: 575 - DNA, 19 bp, Severe acute respiratory syndrome coronavirus 2
aggcacctacacacctcag

SEQ ID NO: 576 - DNA, 19 bp, Severe acute respiratory syndrome coronavirus 2
agactcatctctatgatgg

SEQ ID NO: 577 - DNA, 19 bp, Severe acute respiratory syndrome coronavirus 2
gactcatctctatgatggg

SEQ ID NO: 578 - DNA, 19 bp, Severe acute respiratory syndrome coronavirus 2
actcatctctatgatgggt

SEQ ID NO: 579 - DNA, 19 bp, Severe acute respiratory syndrome coronavirus 2
ctcatctctatgatgggtt

SEQ ID NO: 580 - DNA, 19 bp, Severe acute respiratory syndrome coronavirus 2
tcatctctatgatgggttt

SEQ ID NO: 581 - DNA, 19 bp, Severe acute respiratory syndrome coronavirus 2
cagagtttagaaaatgtgg

SEQ ID NO: 582 - DNA, 19 bp, Severe acute respiratory syndrome coronavirus 2
agagtttagaaaatgtggc

SEQ ID NO: 583 - DNA, 19 bp, Severe acute respiratory syndrome coronavirus 2
gagtttagaaaatgtggct

SEQ ID NO: 584 - DNA, 19 bp, Severe acute respiratory syndrome coronavirus 2
agtttagaaaatgtggctt

SEQ ID NO: 585 - DNA, 19 bp, Severe acute respiratory syndrome coronavirus 2
tttgagctttgggctaagc

SEQ ID NO: 586 - DNA, 19 bp, Severe acute respiratory syndrome coronavirus 2
ttgagctttgggctaagcg

SEQ ID NO: 587 - DNA, 19 bp, Severe acute respiratory syndrome coronavirus 2
atactcaataatttgggtg

SEQ ID NO: 588 - DNA, 19 bp, Severe acute respiratory syndrome coronavirus 2
tactcaataatttgggtgt

SEQ ID NO: 589 - DNA, 19 bp, Severe acute respiratory syndrome coronavirus 2
aatggagtcacattaattg

SEQ ID NO: 590 - DNA, 19 bp, Severe acute respiratory syndrome coronavirus 2
atggagtcacattaattgg

SEQ ID NO: 591 - DNA, 19 bp, Severe acute respiratory syndrome coronavirus 2
tggagtcacattaattgga

SEQ ID NO: 592 - DNA, 19 bp, Severe acute respiratory syndrome coronavirus 2
ggagtcacattaattggag

SEQ ID NO: 593 - DNA, 19 bp, Severe acute respiratory syndrome coronavirus 2
gagtcacattaattggaga

SEQ ID NO: 594 - DNA, 19 bp, Severe acute respiratory syndrome coronavirus 2
agtcacattaattggagaa

SEQ ID NO: 595 - DNA, 19 bp, Severe acute respiratory syndrome coronavirus 2
ataatgatgaatgtcgcaa

SEQ ID NO: 596 - DNA, 19 bp, Severe acute respiratory syndrome coronavirus 2
taatgatgaatgtcgcaaa

SEQ ID NO: 597 - DNA, 19 bp, Severe acute respiratory syndrome coronavirus 2
attagagaaaacaacagag

SEQ ID NO: 598 - DNA, 19 bp, Severe acute respiratory syndrome coronavirus 2
ttagagaaaacaacagagt

SEQ ID NO: 599 - DNA, 19 bp, Severe acute respiratory syndrome coronavirus 2
tagagaaaacaacagagtt

SEQ ID NO: 600 - DNA, 19 bp, Severe acute respiratory syndrome coronavirus 2
agagaaaacaacagagttg

SEQ ID NO: 601 - DNA, 19 bp, Severe acute respiratory syndrome coronavirus 2
gagaaaacaacagagttgt

SEQ ID NO: 602 - DNA, 19 bp, Severe acute respiratory syndrome coronavirus 2
aatgttctctatgagaacc

SEQ ID NO: 603 - DNA, 19 bp, Severe acute respiratory syndrome coronavirus 2
atgttctctatgagaacca

SEQ ID NO: 604 - DNA, 19 bp, Severe acute respiratory syndrome coronavirus 2
tgttctctatgagaaccaa

SEQ ID NO: 605 - DNA, 19 bp, Severe acute respiratory syndrome coronavirus 2
gttctctatgagaaccaaa

SEQ ID NO: 606 - DNA, 19 bp, Severe acute respiratory syndrome coronavirus 2
ttctctatgagaaccaaaa

SEQ ID NO: 607 - DNA, 19 bp, Severe acute respiratory syndrome coronavirus 2
tctctatgagaaccaaaaa

SEQ ID NO: 608 - DNA, 19 bp, Severe acute respiratory syndrome coronavirus 2
cttgttaaacaacttagct

SEQ ID NO: 609 - DNA, 19 bp, Severe acute respiratory syndrome coronavirus 2
ttgttaaacaacttagctc

SEQ ID NO: 610 - DNA, 19 bp, Severe acute respiratory syndrome coronavirus 2
gcttctgctaatcttgctg

SEQ ID NO: 611 - DNA, 19 bp, Severe acute respiratory syndrome coronavirus 2
cttctgctaatcttgctgc

SEQ ID NO: 612 - DNA, 19 bp, Severe acute respiratory syndrome coronavirus 2
ttctgctaatcttgctgct

SEQ ID NO: 613 - DNA, 19 bp, Severe acute respiratory syndrome coronavirus 2
tctgctaatcttgctgcta

SEQ ID NO: 614 - DNA, 19 bp, Severe acute respiratory syndrome coronavirus 2
ctgctaatcttgctgctac

SEQ ID NO: 615 - DNA, 19 bp, Severe acute respiratory syndrome coronavirus 2
tgctaatcttgctgctact

SEQ ID NO: 616 - DNA, 19 bp, Severe acute respiratory syndrome coronavirus 2
gctaatcttgctgctacta

SEQ ID NO: 617 - DNA, 19 bp, Severe acute respiratory syndrome coronavirus 2
ctaatcttgctgctactaa

SEQ ID NO: 618 - DNA, 19 bp, Severe acute respiratory syndrome coronavirus 2
taatcttgctgctactaaa

SEQ ID NO: 619 - DNA, 19 bp, Severe acute respiratory syndrome coronavirus 2
aatcttgctgctactaaaa

SEQ ID NO: 620 - DNA, 19 bp, Severe acute respiratory syndrome coronavirus 2
atcttgctgctactaaaat

SEQ ID NO: 621 - DNA, 19 bp, Severe acute respiratory syndrome coronavirus 2
tcttgctgctactaaaatg

SEQ ID NO: 622 - DNA, 19 bp, Severe acute respiratory syndrome coronavirus 2
cttgctgctactaaaatgt

SEQ ID NO: 623 - DNA, 19 bp, Severe acute respiratory syndrome coronavirus 2
ttgctgctactaaaatgtc

SEQ ID NO: 624 - DNA, 19 bp, Severe acute respiratory syndrome coronavirus 2
cttggacaatcaaaaagag

SEQ ID NO: 625 - DNA, 19 bp, Severe acute respiratory syndrome coronavirus 2
ttggacaatcaaaaagagt

SEQ ID NO: 626 - DNA, 19 bp, Severe acute respiratory syndrome coronavirus 2
tggacaatcaaaaagagtt

SEQ ID NO: 627 - DNA, 19 bp, Severe acute respiratory syndrome coronavirus 2
ggacaatcaaaaagagttg

SEQ ID NO: 628 - DNA, 19 bp, Severe acute respiratory syndrome coronavirus 2
gacaatcaaaaagagttga

SEQ ID NO: 629 - DNA, 19 bp, Severe acute respiratory syndrome coronavirus 2
aatcatacatcaccagatg

SEQ ID NO: 630 - DNA, 19 bp, Severe acute respiratory syndrome coronavirus 2
atcatacatcaccagatgt

SEQ ID NO: 631 - DNA, 19 bp, Severe acute respiratory syndrome coronavirus 2
tcatacatcaccagatgtt

SEQ ID NO: 632 - DNA, 19 bp, Severe acute respiratory syndrome coronavirus 2
catacatcaccagatgttg

SEQ ID NO: 633 - DNA, 19 bp, Severe acute respiratory syndrome coronavirus 2
atacatcaccagatgttga

SEQ ID NO: 634 - DNA, 19 bp, Severe acute respiratory syndrome coronavirus 2
tacatcaccagatgttgat

SEQ ID NO: 635 - DNA, 19 bp, Severe acute respiratory syndrome coronavirus 2
aagaaattgaccgcctcaa

SEQ ID NO: 636 - DNA, 19 bp, Severe acute respiratory syndrome coronavirus 2
agaaattgaccgcctcaat

SEQ ID NO: 637 - DNA, 19 bp, Severe acute respiratory syndrome coronavirus 2
gaaattgaccgcctcaatg

SEQ ID NO: 638 - DNA, 19 bp, Severe acute respiratory syndrome coronavirus 2
aaattgaccgcctcaatga

SEQ ID NO: 639 - DNA, 19 bp, Severe acute respiratory syndrome coronavirus 2
aattgaccgcctcaatgag

SEQ ID NO: 640 - DNA, 19 bp, Severe acute respiratory syndrome coronavirus 2
attgaccgcctcaatgagg

SEQ ID NO: 641 - DNA, 19 bp, Severe acute respiratory syndrome coronavirus 2
ttgaccgcctcaatgaggt

SEQ ID NO: 642 - DNA, 19 bp, Severe acute respiratory syndrome coronavirus 2
gtcaaattacattacacat

SEQ ID NO: 643 - DNA, 19 bp, Severe acute respiratory syndrome coronavirus 2
tcaaattacattacacata

SEQ ID NO: 644 - DNA, 19 bp, Severe acute respiratory syndrome coronavirus 2
caaattacattacacataa

SEQ ID NO: 645 - DNA, 19 bp, Severe acute respiratory syndrome coronavirus 2
aaattacattacacataaa

SEQ ID NO: 646 - DNA, 19 bp, Severe acute respiratory syndrome coronavirus 2
aattacattacacataaac

SEQ ID NO: 647 - DNA, 19 bp, Severe acute respiratory syndrome coronavirus 2
attacattacacataaacg

SEQ ID NO: 648 - DNA, 19 bp, Severe acute respiratory syndrome coronavirus 2
tacaagcctcactcccttt

SEQ ID NO: 649 - DNA, 19 bp, Severe acute respiratory syndrome coronavirus 2
acaagcctcactccctttc

SEQ ID NO: 650 - DNA, 19 bp, Severe acute respiratory syndrome coronavirus 2
caagcctcactccctttcg

SEQ ID NO: 651 - DNA, 19 bp, Severe acute respiratory syndrome coronavirus 2
aagcctcactccctttcgg

SEQ ID NO: 652 - DNA, 19 bp, Severe acute respiratory syndrome coronavirus 2
agcctcactccctttcgga

SEQ ID NO: 653 - DNA, 19 bp, Severe acute respiratory syndrome coronavirus 2
gcctcactccctttcggat

SEQ ID NO: 654 - DNA, 19 bp, Severe acute respiratory syndrome coronavirus 2
cctcactccctttcggatg

SEQ ID NO: 655 - DNA, 19 bp, Severe acute respiratory syndrome coronavirus 2
ctcactccctttcggatgg

SEQ ID NO: 656 - DNA, 19 bp, Severe acute respiratory syndrome coronavirus 2
tcactccctttcggatggc

SEQ ID NO: 657 - DNA, 19 bp, Severe acute respiratory syndrome coronavirus 2
cactccctttcggatggct

SEQ ID NO: 658 - DNA, 19 bp, Severe acute respiratory syndrome coronavirus 2
actccctttcggatggctt

SEQ ID NO: 659 - DNA, 19 bp, Severe acute respiratory syndrome coronavirus 2
ccgacgacgactactagcg

SEQ ID NO: 660 - DNA, 19 bp, Severe acute respiratory syndrome coronavirus 2
cgacgacgactactagcgt

SEQ ID NO: 661 - DNA, 19 bp, Severe acute respiratory syndrome coronavirus 2
gacgacgactactagcgtg

SEQ ID NO: 662 - DNA, 19 bp, Severe acute respiratory syndrome coronavirus 2
acgacgactactagcgtgc

SEQ ID NO: 663 - DNA, 19 bp, Severe acute respiratory syndrome coronavirus 2
cgacgactactagcgtgcc

SEQ ID NO: 664 - DNA, 19 bp, Severe acute respiratory syndrome coronavirus 2
gacgactactagcgtgcct

SEQ ID NO: 665 - DNA, 19 bp, Severe acute respiratory syndrome coronavirus 2
acgactactagcgtgcctt

SEQ ID NO: 666 - DNA, 19 bp, Severe acute respiratory syndrome coronavirus 2
cgactactagcgtgccttt

SEQ ID NO: 667 - DNA, 19 bp, Severe acute respiratory syndrome coronavirus 2
gactactagcgtgcctttg

SEQ ID NO: 668 - DNA, 19 bp, Severe acute respiratory syndrome coronavirus 2
actactagcgtgcctttgt

SEQ ID NO: 669 - DNA, 19 bp, Severe acute respiratory syndrome coronavirus 2
ctactagcgtgcctttgta

SEQ ID NO: 670 - DNA, 19 bp, Severe acute respiratory syndrome coronavirus 2
tactagcgtgcctttgtaa

SEQ ID NO: 671 - DNA, 19 bp, Severe acute respiratory syndrome coronavirus 2
actagcgtgcctttgtaag

SEQ ID NO: 672 - DNA, 19 bp, Severe acute respiratory syndrome coronavirus 2
ctagcgtgcctttgtaagc

SEQ ID NO: 673 - DNA, 19 bp, Severe acute respiratory syndrome coronavirus 2
tagcgtgcctttgtaagca

SEQ ID NO: 674 - DNA, 19 bp, Severe acute respiratory syndrome coronavirus 2
agcgtgcctttgtaagcac

SEQ ID NO: 675 - DNA, 19 bp, Severe acute respiratory syndrome coronavirus 2
gcgtgcctttgtaagcaca

SEQ ID NO: 676 - DNA, 19 bp, Severe acute respiratory syndrome coronavirus 2
cgtgcctttgtaagcacaa

SEQ ID NO: 677 - DNA, 19 bp, Severe acute respiratory syndrome coronavirus 2
gtgcctttgtaagcacaag

SEQ ID NO: 678 - DNA, 19 bp, Severe acute respiratory syndrome coronavirus 2
tgagtacgaacttatgtac

SEQ ID NO: 679 - DNA, 19 bp, Severe acute respiratory syndrome coronavirus 2
gagtacgaacttatgtact

SEQ ID NO: 680 - DNA, 19 bp, Severe acute respiratory syndrome coronavirus 2
agtacgaacttatgtactc

SEQ ID NO: 681 - DNA, 19 bp, Severe acute respiratory syndrome coronavirus 2
gtacgaacttatgtactca

SEQ ID NO: 682 - DNA, 19 bp, Severe acute respiratory syndrome coronavirus 2
tacgaacttatgtactcat

SEQ ID NO: 683 - DNA, 19 bp, Severe acute respiratory syndrome coronavirus 2
acgaacttatgtactcatt

SEQ ID NO: 684 - DNA, 19 bp, Severe acute respiratory syndrome coronavirus 2
cgaacttatgtactcattc

SEQ ID NO: 685 - DNA, 19 bp, Severe acute respiratory syndrome coronavirus 2
gaacttatgtactcattcg

SEQ ID NO: 686 - DNA, 19 bp, Severe acute respiratory syndrome coronavirus 2
aacttatgtactcattcgt

SEQ ID NO: 687 - DNA, 19 bp, Severe acute respiratory syndrome coronavirus 2
acttatgtactcattcgtt

SEQ ID NO: 688 - DNA, 19 bp, Severe acute respiratory syndrome coronavirus 2
cttatgtactcattcgttt

SEQ ID NO: 689 - DNA, 19 bp, Severe acute respiratory syndrome coronavirus 2
ttatgtactcattcgtttc

SEQ ID NO: 690 - DNA, 19 bp, Severe acute respiratory syndrome coronavirus 2
tatgtactcattcgtttcg

SEQ ID NO: 691 - DNA, 19 bp, Severe acute respiratory syndrome coronavirus 2
atgtactcattcgtttcgg

SEQ ID NO: 692 - DNA, 19 bp, Severe acute respiratory syndrome coronavirus 2
tgtactcattcgtttcgga

SEQ ID NO: 693 - DNA, 19 bp, Severe acute respiratory syndrome coronavirus 2
gtactcattcgtttcggaa

SEQ ID NO: 694 - DNA, 19 bp, Severe acute respiratory syndrome coronavirus 2
tactcattcgtttcggaag

SEQ ID NO: 695 - DNA, 19 bp, Severe acute respiratory syndrome coronavirus 2
actcattcgtttcggaaga

SEQ ID NO: 696 - DNA, 19 bp, Severe acute respiratory syndrome coronavirus 2
acaggtacgttaatagtta

SEQ ID NO: 697 - DNA, 19 bp, Severe acute respiratory syndrome coronavirus 2
caggtacgttaatagttaa

SEQ ID NO: 698 - DNA, 19 bp, Severe acute respiratory syndrome coronavirus 2
aggtacgttaatagttaat

SEQ ID NO: 699 - DNA, 19 bp, Severe acute respiratory syndrome coronavirus 2
ggtacgttaatagttaata

SEQ ID NO: 700 - DNA, 19 bp, Severe acute respiratory syndrome coronavirus 2
gtacgttaatagttaatag

SEQ ID NO: 701 - DNA, 19 bp, Severe acute respiratory syndrome coronavirus 2
tacgttaatagttaatagc

SEQ ID NO: 702 - DNA, 19 bp, Severe acute respiratory syndrome coronavirus 2
acgttaatagttaatagcg

SEQ ID NO: 703 - DNA, 19 bp, Severe acute respiratory syndrome coronavirus 2
cgttaatagttaatagcgt

SEQ ID NO: 704 - DNA, 19 bp, Severe acute respiratory syndrome coronavirus 2
gttaatagttaatagcgta

SEQ ID NO: 705 - DNA, 19 bp, Severe acute respiratory syndrome coronavirus 2
ttaatagttaatagcgtac

SEQ ID NO: 706 - DNA, 19 bp, Severe acute respiratory syndrome coronavirus 2
taatagttaatagcgtact

SEQ ID NO: 707 - DNA, 19 bp, Severe acute respiratory syndrome coronavirus 2
aatagttaatagcgtactt

SEQ ID NO: 708 - DNA, 19 bp, Severe acute respiratory syndrome coronavirus 2
atagttaatagcgtacttc

SEQ ID NO: 709 - DNA, 19 bp, Severe acute respiratory syndrome coronavirus 2
tagttaatagcgtacttct

SEQ ID NO: 710 - DNA, 19 bp, Severe acute respiratory syndrome coronavirus 2
agttaatagcgtacttctt

SEQ ID NO: 711 - DNA, 19 bp, Severe acute respiratory syndrome coronavirus 2
gttaatagcgtacttcttt

SEQ ID NO: 712 - DNA, 19 bp, Severe acute respiratory syndrome coronavirus 2
ttaatagcgtacttctttt

SEQ ID NO: 713 - DNA, 19 bp, Severe acute respiratory syndrome coronavirus 2
taatagcgtacttcttttt

SEQ ID NO: 714 - DNA, 19 bp, Severe acute respiratory syndrome coronavirus 2
aatagcgtacttctttttc

SEQ ID NO: 715 - DNA, 19 bp, Severe acute respiratory syndrome coronavirus 2
atagcgtacttctttttct

SEQ ID NO: 716 - DNA, 19 bp, Severe acute respiratory syndrome coronavirus 2
tagcgtacttctttttctt

SEQ ID NO: 717 - DNA, 19 bp, Severe acute respiratory syndrome coronavirus 2
agcgtacttctttttcttg

SEQ ID NO: 718 - DNA, 19 bp, Severe acute respiratory syndrome coronavirus 2
gcgtacttctttttcttgc

SEQ ID NO: 719 - DNA, 19 bp, Severe acute respiratory syndrome coronavirus 2
cgtacttctttttcttgct

SEQ ID NO: 720 - DNA, 19 bp, Severe acute respiratory syndrome coronavirus 2
gtacttctttttcttgctt

SEQ ID NO: 721 - DNA, 19 bp, Severe acute respiratory syndrome coronavirus 2
tacttctttttcttgcttt

SEQ ID NO: 722 - DNA, 19 bp, Severe acute respiratory syndrome coronavirus 2
acttctttttcttgctttc

SEQ ID NO: 723 - DNA, 19 bp, Severe acute respiratory syndrome coronavirus 2
cttctttttcttgctttcg

SEQ ID NO: 724 - DNA, 19 bp, Severe acute respiratory syndrome coronavirus 2
ttctttttcttgctttcgt

SEQ ID NO: 725 - DNA, 19 bp, Severe acute respiratory syndrome coronavirus 2
tctttttcttgctttcgtg

SEQ ID NO: 726 - DNA, 19 bp, Severe acute respiratory syndrome coronavirus 2
ctttttcttgctttcgtgg

SEQ ID NO: 727 - DNA, 19 bp, Severe acute respiratory syndrome coronavirus 2
tttttcttgctttcgtggt

SEQ ID NO: 728 - DNA, 19 bp, Severe acute respiratory syndrome coronavirus 2
ttttcttgctttcgtggta

SEQ ID NO: 729 - DNA, 19 bp, Severe acute respiratory syndrome coronavirus 2
tttcttgctttcgtggtat

SEQ ID NO: 730 - DNA, 19 bp, Severe acute respiratory syndrome coronavirus 2
ttcttgctttcgtggtatt

SEQ ID NO: 731 - DNA, 19 bp, Severe acute respiratory syndrome coronavirus 2
tcttgctttcgtggtattc

SEQ ID NO: 732 - DNA, 19 bp, Severe acute respiratory syndrome coronavirus 2
cttgctttcgtggtattct

SEQ ID NO: 733 - DNA, 19 bp, Severe acute respiratory syndrome coronavirus 2
ttgctttcgtggtattctt

SEQ ID NO: 734 - DNA, 19 bp, Severe acute respiratory syndrome coronavirus 2
tgctttcgtggtattcttg

SEQ ID NO: 735 - DNA, 19 bp, Severe acute respiratory syndrome coronavirus 2
gctttcgtggtattcttgc

SEQ ID NO: 736 - DNA, 19 bp, Severe acute respiratory syndrome coronavirus 2
ctttcgtggtattcttgct

SEQ ID NO: 737 - DNA, 19 bp, Severe acute respiratory syndrome coronavirus 2
tttcgtggtattcttgcta

SEQ ID NO: 738 - DNA, 19 bp, Severe acute respiratory syndrome coronavirus 2
ttcgtggtattcttgctag

SEQ ID NO: 739 - DNA, 19 bp, Severe acute respiratory syndrome coronavirus 2
tcgtggtattcttgctagt

SEQ ID NO: 740 - DNA, 19 bp, Severe acute respiratory syndrome coronavirus 2
acactagccatccttactg

SEQ ID NO: 741 - DNA, 19 bp, Severe acute respiratory syndrome coronavirus 2
cactagccatccttactgc

SEQ ID NO: 742 - DNA, 19 bp, Severe acute respiratory syndrome coronavirus 2
actagccatccttactgcg

SEQ ID NO: 743 - DNA, 19 bp, Severe acute respiratory syndrome coronavirus 2
ctagccatccttactgcgc

SEQ ID NO: 744 - DNA, 19 bp, Severe acute respiratory syndrome coronavirus 2
tagccatccttactgcgct

SEQ ID NO: 745 - DNA, 19 bp, Severe acute respiratory syndrome coronavirus 2
agccatccttactgcgctt

SEQ ID NO: 746 - DNA, 19 bp, Severe acute respiratory syndrome coronavirus 2
gccatccttactgcgcttc

SEQ ID NO: 747 - DNA, 19 bp, Severe acute respiratory syndrome coronavirus 2
ccatccttactgcgcttcg

SEQ ID NO: 748 - DNA, 19 bp, Severe acute respiratory syndrome coronavirus 2
catccttactgcgcttcga

SEQ ID NO: 749 - DNA, 19 bp, Severe acute respiratory syndrome coronavirus 2
atccttactgcgcttcgat

SEQ ID NO: 750 - DNA, 19 bp, Severe acute respiratory syndrome coronavirus 2
tccttactgcgcttcgatt

SEQ ID NO: 751 - DNA, 19 bp, Severe acute respiratory syndrome coronavirus 2
ccttactgcgcttcgattg

SEQ ID NO: 752 - DNA, 19 bp, Severe acute respiratory syndrome coronavirus 2
cttactgcgcttcgattgt

SEQ ID NO: 753 - DNA, 19 bp, Severe acute respiratory syndrome coronavirus 2
ttactgcgcttcgattgtg

SEQ ID NO: 754 - DNA, 19 bp, Severe acute respiratory syndrome coronavirus 2
tactgcgcttcgattgtgt

SEQ ID NO: 755 - DNA, 19 bp, Severe acute respiratory syndrome coronavirus 2
actgcgcttcgattgtgtg

SEQ ID NO: 756 - DNA, 19 bp, Severe acute respiratory syndrome coronavirus 2
ctgcgcttcgattgtgtgc

SEQ ID NO: 757 - DNA, 19 bp, Severe acute respiratory syndrome coronavirus 2
tgcgcttcgattgtgtgcg

SEQ ID NO: 758 - DNA, 19 bp, Severe acute respiratory syndrome coronavirus 2
gcgcttcgattgtgtgcgt

SEQ ID NO: 759 - DNA, 19 bp, Severe acute respiratory syndrome coronavirus 2
cgcttcgattgtgtgcgta

SEQ ID NO: 760 - DNA, 19 bp, Severe acute respiratory syndrome coronavirus 2
gcttcgattgtgtgcgtac

SEQ ID NO: 761 - DNA, 19 bp, Severe acute respiratory syndrome coronavirus 2
cttcgattgtgtgcgtact

SEQ ID NO: 762 - DNA, 19 bp, Severe acute respiratory syndrome coronavirus 2
ttcgattgtgtgcgtactg

SEQ ID NO: 763 - DNA, 19 bp, Severe acute respiratory syndrome coronavirus 2
tcgattgtgtgcgtactgc

SEQ ID NO: 764 - DNA, 19 bp, Severe acute respiratory syndrome coronavirus 2
cgattgtgtgcgtactgct

SEQ ID NO: 765 - DNA, 19 bp, Severe acute respiratory syndrome coronavirus 2
gattgtgtgcgtactgctg

SEQ ID NO: 766 - DNA, 19 bp, Severe acute respiratory syndrome coronavirus 2
attgtgtgcgtactgctgc

SEQ ID NO: 767 - DNA, 19 bp, Severe acute respiratory syndrome coronavirus 2
ttgtgtgcgtactgctgca

SEQ ID NO: 768 - DNA, 19 bp, Severe acute respiratory syndrome coronavirus 2
tgtgtgcgtactgctgcaa

SEQ ID NO: 769 - DNA, 19 bp, Severe acute respiratory syndrome coronavirus 2
gtgtgcgtactgctgcaat

SEQ ID NO: 770 - DNA, 19 bp, Severe acute respiratory syndrome coronavirus 2
tgtgcgtactgctgcaata

SEQ ID NO: 771 - DNA, 19 bp, Severe acute respiratory syndrome coronavirus 2
gtgcgtactgctgcaatat

SEQ ID NO: 772 - DNA, 19 bp, Severe acute respiratory syndrome coronavirus 2
tgcgtactgctgcaatatt

SEQ ID NO: 773 - DNA, 19 bp, Severe acute respiratory syndrome coronavirus 2
gcgtactgctgcaatattg

SEQ ID NO: 774 - DNA, 19 bp, Severe acute respiratory syndrome coronavirus 2
cgtactgctgcaatattgt

SEQ ID NO: 775 - DNA, 19 bp, Severe acute respiratory syndrome coronavirus 2
gtactgctgcaatattgtt

SEQ ID NO: 776 - DNA, 19 bp, Severe acute respiratory syndrome coronavirus 2
tactgctgcaatattgtta

SEQ ID NO: 777 - DNA, 19 bp, Severe acute respiratory syndrome coronavirus 2
actgctgcaatattgttaa

SEQ ID NO: 778 - DNA, 19 bp, Severe acute respiratory syndrome coronavirus 2
ctgctgcaatattgttaac

SEQ ID NO: 779 - DNA, 19 bp, Severe acute respiratory syndrome coronavirus 2
tgctgcaatattgttaacg

SEQ ID NO: 780 - DNA, 19 bp, Severe acute respiratory syndrome coronavirus 2
gctgcaatattgttaacgt

SEQ ID NO: 781 - DNA, 19 bp, Severe acute respiratory syndrome coronavirus 2
ctgcaatattgttaacgtg

SEQ ID NO: 782 - DNA, 19 bp, Severe acute respiratory syndrome coronavirus 2
tgcaatattgttaacgtga

SEQ ID NO: 783 - DNA, 19 bp, Severe acute respiratory syndrome coronavirus 2
gcaatattgttaacgtgag

SEQ ID NO: 784 - DNA, 19 bp, Severe acute respiratory syndrome coronavirus 2
caatattgttaacgtgagt

SEQ ID NO: 785 - DNA, 19 bp, Severe acute respiratory syndrome coronavirus 2
gagttcctgatcttctggt

SEQ ID NO: 786 - DNA, 19 bp, Severe acute respiratory syndrome coronavirus 2
agttcctgatcttctggtc

SEQ ID NO: 787 - DNA, 19 bp, Severe acute respiratory syndrome coronavirus 2
gttcctgatcttctggtct

SEQ ID NO: 788 - DNA, 19 bp, Severe acute respiratory syndrome coronavirus 2
ttcctgatcttctggtcta

SEQ ID NO: 789 - DNA, 19 bp, Severe acute respiratory syndrome coronavirus 2
tcctgatcttctggtctaa

SEQ ID NO: 790 - DNA, 19 bp, Severe acute respiratory syndrome coronavirus 2
cctgatcttctggtctaaa

SEQ ID NO: 791 - DNA, 19 bp, Severe acute respiratory syndrome coronavirus 2
ctgatcttctggtctaaac

SEQ ID NO: 792 - DNA, 19 bp, Severe acute respiratory syndrome coronavirus 2
tgatcttctggtctaaacg

SEQ ID NO: 793 - DNA, 19 bp, Severe acute respiratory syndrome coronavirus 2
gatcttctggtctaaacga

SEQ ID NO: 794 - DNA, 19 bp, Severe acute respiratory syndrome coronavirus 2
atcttctggtctaaacgaa

SEQ ID NO: 795 - DNA, 19 bp, Severe acute respiratory syndrome coronavirus 2
tcttctggtctaaacgaac

SEQ ID NO: 796 - DNA, 19 bp, Severe acute respiratory syndrome coronavirus 2
cttctggtctaaacgaact

SEQ ID NO: 797 - DNA, 19 bp, Severe acute respiratory syndrome coronavirus 2
ttctggtctaaacgaacta

SEQ ID NO: 798 - DNA, 19 bp, Severe acute respiratory syndrome coronavirus 2
tctggtctaaacgaactaa

SEQ ID NO: 799 - DNA, 19 bp, Severe acute respiratory syndrome coronavirus 2
gaacaatggaacctagtaa

SEQ ID NO: 800 - DNA, 19 bp, Severe acute respiratory syndrome coronavirus 2
aacaatggaacctagtaat

SEQ ID NO: 801 - DNA, 19 bp, Severe acute respiratory syndrome coronavirus 2
acaatggaacctagtaata

SEQ ID NO: 802 - DNA, 19 bp, Severe acute respiratory syndrome coronavirus 2
caatggaacctagtaatag

SEQ ID NO: 803 - DNA, 19 bp, Severe acute respiratory syndrome coronavirus 2
aatggaacctagtaatagg

SEQ ID NO: 804 - DNA, 19 bp, Severe acute respiratory syndrome coronavirus 2
atggaacctagtaataggt

SEQ ID NO: 805 - DNA, 19 bp, Severe acute respiratory syndrome coronavirus 2
tggaacctagtaataggtt

SEQ ID NO: 806 - DNA, 19 bp, Severe acute respiratory syndrome coronavirus 2
ggaacctagtaataggttt

SEQ ID NO: 807 - DNA, 19 bp, Severe acute respiratory syndrome coronavirus 2
gaacctagtaataggtttc

SEQ ID NO: 808 - DNA, 19 bp, Severe acute respiratory syndrome coronavirus 2
gctacatcacgaacgcttt

SEQ ID NO: 809 - DNA, 19 bp, Severe acute respiratory syndrome coronavirus 2
ctacatcacgaacgctttc

SEQ ID NO: 810 - DNA, 19 bp, Severe acute respiratory syndrome coronavirus 2
tacatcacgaacgctttct

SEQ ID NO: 811 - DNA, 19 bp, Severe acute respiratory syndrome coronavirus 2
acatcacgaacgctttctt

SEQ ID NO: 812 - DNA, 19 bp, Severe acute respiratory syndrome coronavirus 2
catcacgaacgctttctta

SEQ ID NO: 813 - DNA, 19 bp, Severe acute respiratory syndrome coronavirus 2
atcacgaacgctttcttat

SEQ ID NO: 814 - DNA, 19 bp, Severe acute respiratory syndrome coronavirus 2
tcacgaacgctttcttatt

SEQ ID NO: 815 - DNA, 19 bp, Severe acute respiratory syndrome coronavirus 2
cacgaacgctttcttatta

SEQ ID NO: 816 - DNA, 19 bp, Severe acute respiratory syndrome coronavirus 2
acgaacgctttcttattac

SEQ ID NO: 817 - DNA, 19 bp, Severe acute respiratory syndrome coronavirus 2
cgaacgctttcttattaca

SEQ ID NO: 818 - DNA, 19 bp, Severe acute respiratory syndrome coronavirus 2
gaacgctttcttattacaa

SEQ ID NO: 819 - DNA, 19 bp, Severe acute respiratory syndrome coronavirus 2
aacgctttcttattacaaa

SEQ ID NO: 820 - DNA, 19 bp, Severe acute respiratory syndrome coronavirus 2
acgctttcttattacaaat

SEQ ID NO: 821 - DNA, 19 bp, Severe acute respiratory syndrome coronavirus 2
cgctttcttattacaaatt

SEQ ID NO: 822 - DNA, 19 bp, Severe acute respiratory syndrome coronavirus 2
tcaggttttgctgcataca

SEQ ID NO: 823 - DNA, 19 bp, Severe acute respiratory syndrome coronavirus 2
gtacagtaagtgacaacag

SEQ ID NO: 824 - DNA, 19 bp, Severe acute respiratory syndrome coronavirus 2
tacagtaagtgacaacaga

SEQ ID NO: 825 - DNA, 19 bp, Severe acute respiratory syndrome coronavirus 2
acagtaagtgacaacagat

SEQ ID NO: 826 - DNA, 19 bp, Severe acute respiratory syndrome coronavirus 2
cagtaagtgacaacagatg

SEQ ID NO: 827 - DNA, 19 bp, Severe acute respiratory syndrome coronavirus 2
agtaagtgacaacagatgt

SEQ ID NO: 828 - DNA, 19 bp, Severe acute respiratory syndrome coronavirus 2
gtaagtgacaacagatgtt

SEQ ID NO: 829 - DNA, 19 bp, Severe acute respiratory syndrome coronavirus 2
taagtgacaacagatgttt

SEQ ID NO: 830 - DNA, 19 bp, Severe acute respiratory syndrome coronavirus 2
aagtgacaacagatgtttc

SEQ ID NO: 831 - DNA, 19 bp, Severe acute respiratory syndrome coronavirus 2
agtgacaacagatgtttca

SEQ ID NO: 832 - DNA, 19 bp, Severe acute respiratory syndrome coronavirus 2
gtgacaacagatgtttcat

SEQ ID NO: 833 - DNA, 19 bp, Severe acute respiratory syndrome coronavirus 2
tgacaacagatgtttcatc

SEQ ID NO: 834 - DNA, 19 bp, Severe acute respiratory syndrome coronavirus 2
gacaacagatgtttcatct

SEQ ID NO: 835 - DNA, 19 bp, Severe acute respiratory syndrome coronavirus 2
gattaaacgaacatgaaaa

SEQ ID NO: 836 - DNA, 19 bp, Severe acute respiratory syndrome coronavirus 2
attaaacgaacatgaaaat

SEQ ID NO: 837 - DNA, 19 bp, Severe acute respiratory syndrome coronavirus 2
ttaaacgaacatgaaaatt

SEQ ID NO: 838 - DNA, 19 bp, Severe acute respiratory syndrome coronavirus 2
taaacgaacatgaaaatta

SEQ ID NO: 839 - DNA, 19 bp, Severe acute respiratory syndrome coronavirus 2
aaacgaacatgaaaattat

SEQ ID NO: 840 - DNA, 19 bp, Severe acute respiratory syndrome coronavirus 2
aacgaacatgaaaattatt

SEQ ID NO: 841 - DNA, 19 bp, Severe acute respiratory syndrome coronavirus 2
acgaacatgaaaattattc

SEQ ID NO: 842 - DNA, 19 bp, Severe acute respiratory syndrome coronavirus 2
cgaacatgaaaattattct

SEQ ID NO: 843 - DNA, 19 bp, Severe acute respiratory syndrome coronavirus 2
tacgagggcaattcaccat

SEQ ID NO: 844 - DNA, 19 bp, Severe acute respiratory syndrome coronavirus 2
acgagggcaattcaccatt

SEQ ID NO: 845 - DNA, 19 bp, Severe acute respiratory syndrome coronavirus 2
cgagggcaattcaccattt

SEQ ID NO: 846 - DNA, 19 bp, Severe acute respiratory syndrome coronavirus 2
gagggcaattcaccatttc

SEQ ID NO: 847 - DNA, 19 bp, Severe acute respiratory syndrome coronavirus 2
agggcaattcaccatttca

SEQ ID NO: 848 - DNA, 19 bp, Severe acute respiratory syndrome coronavirus 2
ttaattgacttctatttgt

SEQ ID NO: 849 - DNA, 19 bp, Severe acute respiratory syndrome coronavirus 2
taattgacttctatttgtg

SEQ ID NO: 850 - DNA, 19 bp, Severe acute respiratory syndrome coronavirus 2
aattgacttctatttgtgc

SEQ ID NO: 851 - DNA, 19 bp, Severe acute respiratory syndrome coronavirus 2
attgacttctatttgtgct

SEQ ID NO: 852 - DNA, 19 bp, Severe acute respiratory syndrome coronavirus 2
ttgacttctatttgtgctt

SEQ ID NO: 853 - DNA, 19 bp, Severe acute respiratory syndrome coronavirus 2
tgacttctatttgtgcttt

SEQ ID NO: 854 - DNA, 19 bp, Severe acute respiratory syndrome coronavirus 2
gacttctatttgtgctttt

SEQ ID NO: 855 - DNA, 19 bp, Severe acute respiratory syndrome coronavirus 2
acttctatttgtgcttttt

SEQ ID NO: 856 - DNA, 19 bp, Severe acute respiratory syndrome coronavirus 2
cttctatttgtgcttttta

SEQ ID NO: 857 - DNA, 19 bp, Severe acute respiratory syndrome coronavirus 2
ttctatttgtgctttttag

SEQ ID NO: 858 - DNA, 19 bp, Severe acute respiratory syndrome coronavirus 2
tctatttgtgctttttagc

SEQ ID NO: 859 - DNA, 19 bp, Severe acute respiratory syndrome coronavirus 2
ctatttgtgctttttagcc

SEQ ID NO: 860 - DNA, 19 bp, Severe acute respiratory syndrome coronavirus 2
tatttgtgctttttagcct

SEQ ID NO: 861 - DNA, 19 bp, Severe acute respiratory syndrome coronavirus 2
atttgtgctttttagcctt

SEQ ID NO: 862 - DNA, 19 bp, Severe acute respiratory syndrome coronavirus 2
tttgtgctttttagccttt

SEQ ID NO: 863 - DNA, 19 bp, Severe acute respiratory syndrome coronavirus 2
ttgtgctttttagcctttc

SEQ ID NO: 864 - DNA, 19 bp, Severe acute respiratory syndrome coronavirus 2
tgtgctttttagcctttct

SEQ ID NO: 865 - DNA, 19 bp, Severe acute respiratory syndrome coronavirus 2
gtgctttttagcctttctg

SEQ ID NO: 866 - DNA, 19 bp, Severe acute respiratory syndrome coronavirus 2
tgctttttagcctttctgc

SEQ ID NO: 867 - DNA, 19 bp, Severe acute respiratory syndrome coronavirus 2
gctttttagcctttctgct

SEQ ID NO: 868 - DNA, 19 bp, Severe acute respiratory syndrome coronavirus 2
ctttttagcctttctgcta

SEQ ID NO: 869 - DNA, 19 bp, Severe acute respiratory syndrome coronavirus 2
tttttagcctttctgctat

SEQ ID NO: 870 - DNA, 19 bp, Severe acute respiratory syndrome coronavirus 2
ttttagcctttctgctatt

SEQ ID NO: 871 - DNA, 19 bp, Severe acute respiratory syndrome coronavirus 2
tttagcctttctgctattc

SEQ ID NO: 872 - DNA, 19 bp, Severe acute respiratory syndrome coronavirus 2
ttagcctttctgctattcc

SEQ ID NO: 873 - DNA, 19 bp, Severe acute respiratory syndrome coronavirus 2
tagcctttctgctattcct

SEQ ID NO: 874 - DNA, 19 bp, Severe acute respiratory syndrome coronavirus 2
agcctttctgctattcctt

SEQ ID NO: 875 - DNA, 19 bp, Severe acute respiratory syndrome coronavirus 2
gcctttctgctattccttg

SEQ ID NO: 876 - DNA, 19 bp, Severe acute respiratory syndrome coronavirus 2
cctttctgctattccttgt

SEQ ID NO: 877 - DNA, 19 bp, Severe acute respiratory syndrome coronavirus 2
ctttctgctattccttgtt

SEQ ID NO: 878 - DNA, 19 bp, Severe acute respiratory syndrome coronavirus 2
taaaatgtctgataatgga

SEQ ID NO: 879 - DNA, 19 bp, Severe acute respiratory syndrome coronavirus 2
aaaatgtctgataatggac

SEQ ID NO: 880 - DNA, 19 bp, Severe acute respiratory syndrome coronavirus 2
aaatgtctgataatggacc

SEQ ID NO: 881 - DNA, 19 bp, Severe acute respiratory syndrome coronavirus 2
aatgtctgataatggaccc

SEQ ID NO: 882 - DNA, 19 bp, Severe acute respiratory syndrome coronavirus 2
atgtctgataatggacccc

SEQ ID NO: 883 - DNA, 19 bp, Severe acute respiratory syndrome coronavirus 2
tgtctgataatggacccca

SEQ ID NO: 884 - DNA, 19 bp, Severe acute respiratory syndrome coronavirus 2
gtctgataatggaccccaa

SEQ ID NO: 885 - DNA, 19 bp, Severe acute respiratory syndrome coronavirus 2
tctgataatggaccccaaa

SEQ ID NO: 886 - DNA, 19 bp, Severe acute respiratory syndrome coronavirus 2
ctgataatggaccccaaaa

SEQ ID NO: 887 - DNA, 19 bp, Severe acute respiratory syndrome coronavirus 2
ccccaaggtttacccaata

SEQ ID NO: 888 - DNA, 19 bp, Severe acute respiratory syndrome coronavirus 2
cccaaggtttacccaataa

SEQ ID NO: 889 - DNA, 19 bp, Severe acute respiratory syndrome coronavirus 2
ccaaggtttacccaataat

SEQ ID NO: 890 - DNA, 19 bp, Severe acute respiratory syndrome coronavirus 2
caaggtttacccaataata

SEQ ID NO: 891 - DNA, 19 bp, Severe acute respiratory syndrome coronavirus 2
aaggtttacccaataatac

SEQ ID NO: 892 - DNA, 19 bp, Severe acute respiratory syndrome coronavirus 2
aggtttacccaataatact

SEQ ID NO: 893 - DNA, 19 bp, Severe acute respiratory syndrome coronavirus 2
ggtttacccaataatactg

SEQ ID NO: 894 - DNA, 19 bp, Severe acute respiratory syndrome coronavirus 2
gtttacccaataatactgc

SEQ ID NO: 895 - DNA, 19 bp, Severe acute respiratory syndrome coronavirus 2
tttacccaataatactgcg

SEQ ID NO: 896 - DNA, 19 bp, Severe acute respiratory syndrome coronavirus 2
ttacccaataatactgcgt

SEQ ID NO: 897 - DNA, 19 bp, Severe acute respiratory syndrome coronavirus 2
tacccaataatactgcgtc

SEQ ID NO: 898 - DNA, 19 bp, Severe acute respiratory syndrome coronavirus 2
acccaataatactgcgtct

SEQ ID NO: 899 - DNA, 19 bp, Severe acute respiratory syndrome coronavirus 2
cccaataatactgcgtctt

SEQ ID NO: 900 - DNA, 19 bp, Severe acute respiratory syndrome coronavirus 2
ccaataatactgcgtcttg

SEQ ID NO: 901 - DNA, 19 bp, Severe acute respiratory syndrome coronavirus 2
caataatactgcgtcttgg

SEQ ID NO: 902 - DNA, 19 bp, Severe acute respiratory syndrome coronavirus 2
aataatactgcgtcttggt

SEQ ID NO: 903 - DNA, 19 bp, Severe acute respiratory syndrome coronavirus 2
ataatactgcgtcttggtt

SEQ ID NO: 904 - DNA, 19 bp, Severe acute respiratory syndrome coronavirus 2
taatactgcgtcttggttc

SEQ ID NO: 905 - DNA, 19 bp, Severe acute respiratory syndrome coronavirus 2
aatactgcgtcttggttca

SEQ ID NO: 906 - DNA, 19 bp, Severe acute respiratory syndrome coronavirus 2
atactgcgtcttggttcac

SEQ ID NO: 907 - DNA, 19 bp, Severe acute respiratory syndrome coronavirus 2
agatgaccaaattggctac

SEQ ID NO: 908 - DNA, 19 bp, Severe acute respiratory syndrome coronavirus 2
gatgaccaaattggctact

SEQ ID NO: 909 - DNA, 19 bp, Severe acute respiratory syndrome coronavirus 2
atgaccaaattggctacta

SEQ ID NO: 910 - DNA, 19 bp, Severe acute respiratory syndrome coronavirus 2
tgaccaaattggctactac

SEQ ID NO: 911 - DNA, 19 bp, Severe acute respiratory syndrome coronavirus 2
gaccaaattggctactacc

SEQ ID NO: 912 - DNA, 19 bp, Severe acute respiratory syndrome coronavirus 2
accaaattggctactaccg

SEQ ID NO: 913 - DNA, 19 bp, Severe acute respiratory syndrome coronavirus 2
ccaaattggctactaccga

SEQ ID NO: 914 - DNA, 19 bp, Severe acute respiratory syndrome coronavirus 2
caaattggctactaccgaa

SEQ ID NO: 915 - DNA, 19 bp, Severe acute respiratory syndrome coronavirus 2
aaattggctactaccgaag

SEQ ID NO: 916 - DNA, 19 bp, Severe acute respiratory syndrome coronavirus 2
aattggctactaccgaaga

SEQ ID NO: 917 - DNA, 19 bp, Severe acute respiratory syndrome coronavirus 2
attggctactaccgaagag

SEQ ID NO: 918 - DNA, 19 bp, Severe acute respiratory syndrome coronavirus 2
ttggctactaccgaagagc

SEQ ID NO: 919 - DNA, 19 bp, Severe acute respiratory syndrome coronavirus 2
tggctactaccgaagagct

SEQ ID NO: 920 - DNA, 19 bp, Severe acute respiratory syndrome coronavirus 2
ggctactaccgaagagcta

SEQ ID NO: 921 - DNA, 19 bp, Severe acute respiratory syndrome coronavirus 2
gctactaccgaagagctac

SEQ ID NO: 922 - DNA, 19 bp, Severe acute respiratory syndrome coronavirus 2
ctactaccgaagagctacc

SEQ ID NO: 923 - DNA, 19 bp, Severe acute respiratory syndrome coronavirus 2
gcaactgagggagccttga

SEQ ID NO: 924 - DNA, 19 bp, Severe acute respiratory syndrome coronavirus 2
caactgagggagccttgaa

SEQ ID NO: 925 - DNA, 19 bp, Severe acute respiratory syndrome coronavirus 2
cacattggcacccgcaatc

SEQ ID NO: 926 - DNA, 19 bp, Severe acute respiratory syndrome coronavirus 2
acattggcacccgcaatcc

SEQ ID NO: 927 - DNA, 19 bp, Severe acute respiratory syndrome coronavirus 2
cattggcacccgcaatcct

SEQ ID NO: 928 - DNA, 19 bp, Severe acute respiratory syndrome coronavirus 2
cgtgctacaacttcctcaa

SEQ ID NO: 929 - DNA, 19 bp, Severe acute respiratory syndrome coronavirus 2
gtgctacaacttcctcaag

SEQ ID NO: 930 - DNA, 19 bp, Severe acute respiratory syndrome coronavirus 2
tgctacaacttcctcaagg

SEQ ID NO: 931 - DNA, 19 bp, Severe acute respiratory syndrome coronavirus 2
gctacaacttcctcaagga

SEQ ID NO: 932 - DNA, 19 bp, Severe acute respiratory syndrome coronavirus 2
ctacaacttcctcaaggaa

SEQ ID NO: 933 - DNA, 19 bp, Severe acute respiratory syndrome coronavirus 2
tacaacttcctcaaggaac

SEQ ID NO: 934 - DNA, 19 bp, Severe acute respiratory syndrome coronavirus 2
acaacttcctcaaggaaca

SEQ ID NO: 935 - DNA, 19 bp, Severe acute respiratory syndrome coronavirus 2
caacttcctcaaggaacaa

SEQ ID NO: 936 - DNA, 19 bp, Severe acute respiratory syndrome coronavirus 2
aacttcctcaaggaacaac

SEQ ID NO: 937 - DNA, 19 bp, Severe acute respiratory syndrome coronavirus 2
acttcctcaaggaacaaca

SEQ ID NO: 938 - DNA, 19 bp, Severe acute respiratory syndrome coronavirus 2
cttcctcaaggaacaacat

SEQ ID NO: 939 - DNA, 19 bp, Severe acute respiratory syndrome coronavirus 2
ttcctcaaggaacaacatt

SEQ ID NO: 940 - DNA, 19 bp, Severe acute respiratory syndrome coronavirus 2
tcctcaaggaacaacattg

SEQ ID NO: 941 - DNA, 19 bp, Severe acute respiratory syndrome coronavirus 2
cctcaaggaacaacattgc

SEQ ID NO: 942 - DNA, 19 bp, Severe acute respiratory syndrome coronavirus 2
ctcaaggaacaacattgcc

SEQ ID NO: 943 - DNA, 19 bp, Severe acute respiratory syndrome coronavirus 2
tcaaggaacaacattgcca

SEQ ID NO: 944 - DNA, 19 bp, Severe acute respiratory syndrome coronavirus 2
caaggaacaacattgccaa

SEQ ID NO: 945 - DNA, 19 bp, Severe acute respiratory syndrome coronavirus 2
aaggaacaacattgccaaa

SEQ ID NO: 946 - DNA, 19 bp, Severe acute respiratory syndrome coronavirus 2
aggaacaacattgccaaaa

SEQ ID NO: 947 - DNA, 19 bp, Severe acute respiratory syndrome coronavirus 2
ggaacaacattgccaaaag

SEQ ID NO: 948 - DNA, 19 bp, Severe acute respiratory syndrome coronavirus 2
gaacaacattgccaaaagg

SEQ ID NO: 949 - DNA, 19 bp, Severe acute respiratory syndrome coronavirus 2
aacaacattgccaaaaggc

SEQ ID NO: 950 - DNA, 19 bp, Severe acute respiratory syndrome coronavirus 2
acaacattgccaaaaggct

SEQ ID NO: 951 - DNA, 19 bp, Severe acute respiratory syndrome coronavirus 2
caacattgccaaaaggctt

SEQ ID NO: 952 - DNA, 19 bp, Severe acute respiratory syndrome coronavirus 2
aacattgccaaaaggcttc

SEQ ID NO: 953 - DNA, 19 bp, Severe acute respiratory syndrome coronavirus 2
acattgccaaaaggcttct

SEQ ID NO: 954 - DNA, 19 bp, Severe acute respiratory syndrome coronavirus 2
cattgccaaaaggcttcta

SEQ ID NO: 955 - DNA, 19 bp, Severe acute respiratory syndrome coronavirus 2
attgccaaaaggcttctac

SEQ ID NO: 956 - DNA, 19 bp, Severe acute respiratory syndrome coronavirus 2
ttgccaaaaggcttctacg

SEQ ID NO: 957 - DNA, 19 bp, Severe acute respiratory syndrome coronavirus 2
tgccaaaaggcttctacgc

SEQ ID NO: 958 - DNA, 19 bp, Severe acute respiratory syndrome coronavirus 2
gccaaaaggcttctacgca

SEQ ID NO: 959 - DNA, 19 bp, Severe acute respiratory syndrome coronavirus 2
ccaaaaggcttctacgcag

SEQ ID NO: 960 - DNA, 19 bp, Severe acute respiratory syndrome coronavirus 2
caaaaggcttctacgcaga

SEQ ID NO: 961 - DNA, 19 bp, Severe acute respiratory syndrome coronavirus 2
agcagaggcggcagtcaag

SEQ ID NO: 962 - DNA, 19 bp, Severe acute respiratory syndrome coronavirus 2
gcagaggcggcagtcaagc

SEQ ID NO: 963 - DNA, 19 bp, Severe acute respiratory syndrome coronavirus 2
cagaggcggcagtcaagcc

SEQ ID NO: 964 - DNA, 19 bp, Severe acute respiratory syndrome coronavirus 2
agaggcggcagtcaagcct

SEQ ID NO: 965 - DNA, 19 bp, Severe acute respiratory syndrome coronavirus 2
gaggcggcagtcaagcctc

SEQ ID NO: 966 - DNA, 19 bp, Severe acute respiratory syndrome coronavirus 2
aggcggcagtcaagcctct

SEQ ID NO: 967 - DNA, 19 bp, Severe acute respiratory syndrome coronavirus 2
ggcggcagtcaagcctctt

SEQ ID NO: 968 - DNA, 19 bp, Severe acute respiratory syndrome coronavirus 2
gcggcagtcaagcctcttc

SEQ ID NO: 969 - DNA, 19 bp, Severe acute respiratory syndrome coronavirus 2
cggcagtcaagcctcttct

SEQ ID NO: 970 - DNA, 19 bp, Severe acute respiratory syndrome coronavirus 2
ggcagtcaagcctcttctc

SEQ ID NO: 971 - DNA, 19 bp, Severe acute respiratory syndrome coronavirus 2
gcagtcaagcctcttctcg

SEQ ID NO: 972 - DNA, 19 bp, Severe acute respiratory syndrome coronavirus 2
gacagattgaaccagcttg

SEQ ID NO: 973 - DNA, 19 bp, Severe acute respiratory syndrome coronavirus 2
acagattgaaccagcttga

SEQ ID NO: 974 - DNA, 19 bp, Severe acute respiratory syndrome coronavirus 2
cagattgaaccagcttgag

SEQ ID NO: 975 - DNA, 19 bp, Severe acute respiratory syndrome coronavirus 2
agattgaaccagcttgaga

SEQ ID NO: 976 - DNA, 19 bp, Severe acute respiratory syndrome coronavirus 2
gattgaaccagcttgagag

SEQ ID NO: 977 - DNA, 19 bp, Severe acute respiratory syndrome coronavirus 2
attgaaccagcttgagagc

SEQ ID NO: 978 - DNA, 19 bp, Severe acute respiratory syndrome coronavirus 2
ttgaaccagcttgagagca

SEQ ID NO: 979 - DNA, 19 bp, Severe acute respiratory syndrome coronavirus 2
tgaaccagcttgagagcaa

SEQ ID NO: 980 - DNA, 19 bp, Severe acute respiratory syndrome coronavirus 2
gaaccagcttgagagcaaa

SEQ ID NO: 981 - DNA, 19 bp, Severe acute respiratory syndrome coronavirus 2
tctggtaaaggccaacaac

SEQ ID NO: 982 - DNA, 19 bp, Severe acute respiratory syndrome coronavirus 2
ctggtaaaggccaacaaca

SEQ ID NO: 983 - DNA, 19 bp, Severe acute respiratory syndrome coronavirus 2
tggtaaaggccaacaacaa

SEQ ID NO: 984 - DNA, 19 bp, Severe acute respiratory syndrome coronavirus 2
ggtaaaggccaacaacaac

SEQ ID NO: 985 - DNA, 19 bp, Severe acute respiratory syndrome coronavirus 2
gtaaaggccaacaacaaca

SEQ ID NO: 986 - DNA, 19 bp, Severe acute respiratory syndrome coronavirus 2
taaaggccaacaacaacaa

SEQ ID NO: 987 - DNA, 19 bp, Severe acute respiratory syndrome coronavirus 2
aaaggccaacaacaacaag

SEQ ID NO: 988 - DNA, 19 bp, Severe acute respiratory syndrome coronavirus 2
aaggccaacaacaacaagg

SEQ ID NO: 989 - DNA, 19 bp, Severe acute respiratory syndrome coronavirus 2
aggccaacaacaacaaggc

SEQ ID NO: 990 - DNA, 19 bp, Severe acute respiratory syndrome coronavirus 2
ggccaacaacaacaaggcc

SEQ ID NO: 991 - DNA, 19 bp, Severe acute respiratory syndrome coronavirus 2
gccaacaacaacaaggcca

SEQ ID NO: 992 - DNA, 19 bp, Severe acute respiratory syndrome coronavirus 2
ccaacaacaacaaggccaa

SEQ ID NO: 993 - DNA, 19 bp, Severe acute respiratory syndrome coronavirus 2
caacaacaacaaggccaaa

SEQ ID NO: 994 - DNA, 19 bp, Severe acute respiratory syndrome coronavirus 2
aacaacaacaaggccaaac

SEQ ID NO: 995 - DNA, 19 bp, Severe acute respiratory syndrome coronavirus 2
acaacaacaaggccaaact

SEQ ID NO: 996 - DNA, 19 bp, Severe acute respiratory syndrome coronavirus 2
caacaacaaggccaaactg

SEQ ID NO: 997 - DNA, 19 bp, Severe acute respiratory syndrome coronavirus 2
aacaacaaggccaaactgt

SEQ ID NO: 998 - DNA, 19 bp, Severe acute respiratory syndrome coronavirus 2
acaacaaggccaaactgtc

SEQ ID NO: 999 - DNA, 19 bp, Severe acute respiratory syndrome coronavirus 2
caacaaggccaaactgtca

SEQ ID NO: 1000 - DNA, 19 bp, Severe acute respiratory syndrome coronavirus 2
aacaaggccaaactgtcac

SEQ ID NO: 1001 - DNA, 19 bp, Severe acute respiratory syndrome coronavirus 2
acaaggccaaactgtcact

SEQ ID NO: 1002 - DNA, 19 bp, Severe acute respiratory syndrome coronavirus 2
caaggccaaactgtcacta

SEQ ID NO: 1003 - DNA, 19 bp, Severe acute respiratory syndrome coronavirus 2
aaggccaaactgtcactaa

SEQ ID NO: 1004 - DNA, 19 bp, Severe acute respiratory syndrome coronavirus 2
aggccaaactgtcactaag

SEQ ID NO: 1005 - DNA, 19 bp, Severe acute respiratory syndrome coronavirus 2
ggccaaactgtcactaaga

SEQ ID NO: 1006 - DNA, 19 bp, Severe acute respiratory syndrome coronavirus 2
gccaaactgtcactaagaa

SEQ ID NO: 1007 - DNA, 19 bp, Severe acute respiratory syndrome coronavirus 2
ccaaactgtcactaagaaa

SEQ ID NO: 1008 - DNA, 19 bp, Severe acute respiratory syndrome coronavirus 2
caaactgtcactaagaaat

SEQ ID NO: 1009 - DNA, 19 bp, Severe acute respiratory syndrome coronavirus 2
aaactgtcactaagaaatc

SEQ ID NO: 1010 - DNA, 19 bp, Severe acute respiratory syndrome coronavirus 2
aactgtcactaagaaatct

SEQ ID NO: 1011 - DNA, 19 bp, Severe acute respiratory syndrome coronavirus 2
actgtcactaagaaatctg

SEQ ID NO: 1012 - DNA, 19 bp, Severe acute respiratory syndrome coronavirus 2
ctgtcactaagaaatctgc

SEQ ID NO: 1013 - DNA, 19 bp, Severe acute respiratory syndrome coronavirus 2
tgtcactaagaaatctgct

SEQ ID NO: 1014 - DNA, 19 bp, Severe acute respiratory syndrome coronavirus 2
gtcactaagaaatctgctg

SEQ ID NO: 1015 - DNA, 19 bp, Severe acute respiratory syndrome coronavirus 2
tcactaagaaatctgctgc

SEQ ID NO: 1016 - DNA, 19 bp, Severe acute respiratory syndrome coronavirus 2
cactaagaaatctgctgct

SEQ ID NO: 1017 - DNA, 19 bp, Severe acute respiratory syndrome coronavirus 2
actaagaaatctgctgctg

SEQ ID NO: 1018 - DNA, 19 bp, Severe acute respiratory syndrome coronavirus 2
ctaagaaatctgctgctga

SEQ ID NO: 1019 - DNA, 19 bp, Severe acute respiratory syndrome coronavirus 2
taagaaatctgctgctgag

SEQ ID NO: 1020 - DNA, 19 bp, Severe acute respiratory syndrome coronavirus 2
aagaaatctgctgctgagg

SEQ ID NO: 1021 - DNA, 19 bp, Severe acute respiratory syndrome coronavirus 2
agaaatctgctgctgaggc

SEQ ID NO: 1022 - DNA, 19 bp, Severe acute respiratory syndrome coronavirus 2
ctaatcagacaaggaactg

SEQ ID NO: 1023 - DNA, 19 bp, Severe acute respiratory syndrome coronavirus 2
taatcagacaaggaactga

SEQ ID NO: 1024 - DNA, 19 bp, Severe acute respiratory syndrome coronavirus 2
aatcagacaaggaactgat

SEQ ID NO: 1025 - DNA, 19 bp, Severe acute respiratory syndrome coronavirus 2
atcagacaaggaactgatt

SEQ ID NO: 1026 - DNA, 19 bp, Severe acute respiratory syndrome coronavirus 2
tcagacaaggaactgatta

SEQ ID NO: 1027 - DNA, 19 bp, Severe acute respiratory syndrome coronavirus 2
cagacaaggaactgattac

SEQ ID NO: 1028 - DNA, 19 bp, Severe acute respiratory syndrome coronavirus 2
agacaaggaactgattaca

SEQ ID NO: 1029 - DNA, 19 bp, Severe acute respiratory syndrome coronavirus 2
gacaaggaactgattacaa

SEQ ID NO: 1030 - DNA, 19 bp, Severe acute respiratory syndrome coronavirus 2
acaaggaactgattacaaa

SEQ ID NO: 1031 - DNA, 19 bp, Severe acute respiratory syndrome coronavirus 2
caaggaactgattacaaac

SEQ ID NO: 1032 - DNA, 19 bp, Severe acute respiratory syndrome coronavirus 2
aaggaactgattacaaaca

SEQ ID NO: 1033 - DNA, 19 bp, Severe acute respiratory syndrome coronavirus 2
tggccgcaaattgcacaat

SEQ ID NO: 1034 - DNA, 19 bp, Severe acute respiratory syndrome coronavirus 2
ggccgcaaattgcacaatt

SEQ ID NO: 1035 - DNA, 19 bp, Severe acute respiratory syndrome coronavirus 2
gccgcaaattgcacaattt

SEQ ID NO: 1036 - DNA, 19 bp, Severe acute respiratory syndrome coronavirus 2
ccgcaaattgcacaatttg

SEQ ID NO: 1037 - DNA, 19 bp, Severe acute respiratory syndrome coronavirus 2
cgcaaattgcacaatttgc

SEQ ID NO: 1038 - DNA, 19 bp, Severe acute respiratory syndrome coronavirus 2
cgcattggcatggaagtca

SEQ ID NO: 1039 - DNA, 19 bp, Severe acute respiratory syndrome coronavirus 2
gcattggcatggaagtcac

SEQ ID NO: 1040 - DNA, 19 bp, Severe acute respiratory syndrome coronavirus 2
cattggcatggaagtcaca

SEQ ID NO: 1041 - DNA, 19 bp, Severe acute respiratory syndrome coronavirus 2
attggcatggaagtcacac

SEQ ID NO: 1042 - DNA, 19 bp, Severe acute respiratory syndrome coronavirus 2
ttggcatggaagtcacacc

SEQ ID NO: 1043 - DNA, 19 bp, Severe acute respiratory syndrome coronavirus 2
tggcatggaagtcacacct

SEQ ID NO: 1044 - DNA, 19 bp, Severe acute respiratory syndrome coronavirus 2
ggcatggaagtcacacctt

SEQ ID NO: 1045 - DNA, 19 bp, Severe acute respiratory syndrome coronavirus 2
gcatggaagtcacaccttc

SEQ ID NO: 1046 - DNA, 19 bp, Severe acute respiratory syndrome coronavirus 2
catggaagtcacaccttcg

SEQ ID NO: 1047 - DNA, 19 bp, Severe acute respiratory syndrome coronavirus 2
atggaagtcacaccttcgg

SEQ ID NO: 1048 - DNA, 19 bp, Severe acute respiratory syndrome coronavirus 2
tggaagtcacaccttcggg

SEQ ID NO: 1049 - DNA, 19 bp, Severe acute respiratory syndrome coronavirus 2
ggaagtcacaccttcggga

SEQ ID NO: 1050 - DNA, 19 bp, Severe acute respiratory syndrome coronavirus 2
gaagtcacaccttcgggaa

SEQ ID NO: 1051 - DNA, 19 bp, Severe acute respiratory syndrome coronavirus 2
aagtcacaccttcgggaac

SEQ ID NO: 1052 - DNA, 19 bp, Severe acute respiratory syndrome coronavirus 2
aaattggatgacaaagatc

SEQ ID NO: 1053 - DNA, 19 bp, Severe acute respiratory syndrome coronavirus 2
aattggatgacaaagatcc

SEQ ID NO: 1054 - DNA, 19 bp, Severe acute respiratory syndrome coronavirus 2
attggatgacaaagatcca

SEQ ID NO: 1055 - DNA, 19 bp, Severe acute respiratory syndrome coronavirus 2
attgacgcatacaaaacat

SEQ ID NO: 1056 - DNA, 19 bp, Severe acute respiratory syndrome coronavirus 2
ttgacgcatacaaaacatt

SEQ ID NO: 1057 - DNA, 19 bp, Severe acute respiratory syndrome coronavirus 2
tgacgcatacaaaacattc

SEQ ID NO: 1058 - DNA, 19 bp, Severe acute respiratory syndrome coronavirus 2
gacgcatacaaaacattcc

SEQ ID NO: 1059 - DNA, 19 bp, Severe acute respiratory syndrome coronavirus 2
acgcatacaaaacattccc

SEQ ID NO: 1060 - DNA, 19 bp, Severe acute respiratory syndrome coronavirus 2
cgcatacaaaacattccca

SEQ ID NO: 1061 - DNA, 19 bp, Severe acute respiratory syndrome coronavirus 2
gcatacaaaacattcccac

SEQ ID NO: 1062 - DNA, 19 bp, Severe acute respiratory syndrome coronavirus 2
catacaaaacattcccacc

SEQ ID NO: 1063 - DNA, 19 bp, Severe acute respiratory syndrome coronavirus 2
atacaaaacattcccacca

SEQ ID NO: 1064 - DNA, 19 bp, Severe acute respiratory syndrome coronavirus 2
tacaaaacattcccaccaa

SEQ ID NO: 1065 - DNA, 19 bp, Severe acute respiratory syndrome coronavirus 2
acaaaacattcccaccaac

SEQ ID NO: 1066 - DNA, 19 bp, Severe acute respiratory syndrome coronavirus 2
caaaacattcccaccaaca

SEQ ID NO: 1067 - DNA, 19 bp, Severe acute respiratory syndrome coronavirus 2
aaaacattcccaccaacag

SEQ ID NO: 1068 - DNA, 19 bp, Severe acute respiratory syndrome coronavirus 2
aaacattcccaccaacaga

SEQ ID NO: 1069 - DNA, 19 bp, Severe acute respiratory syndrome coronavirus 2
aacattcccaccaacagag

SEQ ID NO: 1070 - DNA, 19 bp, Severe acute respiratory syndrome coronavirus 2
acattcccaccaacagagc

SEQ ID NO: 1071 - DNA, 19 bp, Severe acute respiratory syndrome coronavirus 2
cattcccaccaacagagcc

SEQ ID NO: 1072 - DNA, 19 bp, Severe acute respiratory syndrome coronavirus 2
attcccaccaacagagcct

SEQ ID NO: 1073 - DNA, 19 bp, Severe acute respiratory syndrome coronavirus 2
ttcccaccaacagagccta

SEQ ID NO: 1074 - DNA, 19 bp, Severe acute respiratory syndrome coronavirus 2
tcccaccaacagagcctaa

SEQ ID NO: 1075 - DNA, 19 bp, Severe acute respiratory syndrome coronavirus 2
cccaccaacagagcctaaa

SEQ ID NO: 1076 - DNA, 19 bp, Severe acute respiratory syndrome coronavirus 2
ccaccaacagagcctaaaa

SEQ ID NO: 1077 - DNA, 19 bp, Severe acute respiratory syndrome coronavirus 2
caccaacagagcctaaaaa

SEQ ID NO: 1078 - DNA, 19 bp, Severe acute respiratory syndrome coronavirus 2
accaacagagcctaaaaag

SEQ ID NO: 1079 - DNA, 19 bp, Severe acute respiratory syndrome coronavirus 2
ccaacagagcctaaaaagg

SEQ ID NO: 1080 - DNA, 19 bp, Severe acute respiratory syndrome coronavirus 2
caacagagcctaaaaagga

SEQ ID NO: 1081 - DNA, 19 bp, Severe acute respiratory syndrome coronavirus 2
aacagagcctaaaaaggac

SEQ ID NO: 1082 - DNA, 19 bp, Severe acute respiratory syndrome coronavirus 2
acagagcctaaaaaggaca

SEQ ID NO: 1083 - DNA, 19 bp, Severe acute respiratory syndrome coronavirus 2
cagagcctaaaaaggacaa

SEQ ID NO: 1084 - DNA, 19 bp, Severe acute respiratory syndrome coronavirus 2
agagcctaaaaaggacaaa

SEQ ID NO: 1085 - DNA, 19 bp, Severe acute respiratory syndrome coronavirus 2
gagcctaaaaaggacaaaa

SEQ ID NO: 1086 - DNA, 19 bp, Severe acute respiratory syndrome coronavirus 2
agcctaaaaaggacaaaaa

SEQ ID NO: 1087 - DNA, 19 bp, Severe acute respiratory syndrome coronavirus 2
gcctaaaaaggacaaaaag

SEQ ID NO: 1088 - DNA, 19 bp, Severe acute respiratory syndrome coronavirus 2
cctaaaaaggacaaaaaga

SEQ ID NO: 1089 - DNA, 19 bp, Severe acute respiratory syndrome coronavirus 2
ctaaaaaggacaaaaagaa

SEQ ID NO: 1090 - DNA, 19 bp, Severe acute respiratory syndrome coronavirus 2
actgtgactcttcttcctg

SEQ ID NO: 1091 - DNA, 19 bp, Severe acute respiratory syndrome coronavirus 2
ctgtgactcttcttcctgc

SEQ ID NO: 1092 - DNA, 19 bp, Severe acute respiratory syndrome coronavirus 2
gaccacacaaggcagatgg

SEQ ID NO: 1093 - DNA, 19 bp, Severe acute respiratory syndrome coronavirus 2
accacacaaggcagatggg

SEQ ID NO: 1094 - DNA, 19 bp, Severe acute respiratory syndrome coronavirus 2
ccacacaaggcagatgggc

SEQ ID NO: 1095 - DNA, 19 bp, Severe acute respiratory syndrome coronavirus 2
cacacaaggcagatgggct

SEQ ID NO: 1096 - DNA, 19 bp, Severe acute respiratory syndrome coronavirus 2
acacaaggcagatgggcta

SEQ ID NO: 1097 - DNA, 19 bp, Severe acute respiratory syndrome coronavirus 2
cacaaggcagatgggctat

SEQ ID NO: 1098 - DNA, 19 bp, Severe acute respiratory syndrome coronavirus 2
atagtctactcttgtgcag

SEQ ID NO: 1099 - DNA, 19 bp, Severe acute respiratory syndrome coronavirus 2
tagtctactcttgtgcaga

SEQ ID NO: 1100 - DNA, 19 bp, Severe acute respiratory syndrome coronavirus 2
agtctactcttgtgcagaa

SEQ ID NO: 1101 - DNA, 19 bp, Severe acute respiratory syndrome coronavirus 2
gtctactcttgtgcagaat

SEQ ID NO: 1102 - DNA, 19 bp, Severe acute respiratory syndrome coronavirus 2
tctactcttgtgcagaatg

SEQ ID NO: 1103 - DNA, 19 bp, Severe acute respiratory syndrome coronavirus 2
ctactcttgtgcagaatga

SEQ ID NO: 1104 - DNA, 19 bp, Severe acute respiratory syndrome coronavirus 2
tactcttgtgcagaatgaa

SEQ ID NO: 1105 - DNA, 19 bp, Severe acute respiratory syndrome coronavirus 2
actcttgtgcagaatgaat

SEQ ID NO: 1106 - DNA, 19 bp, Severe acute respiratory syndrome coronavirus 2
ctcttgtgcagaatgaatt

SEQ ID NO: 1107 - DNA, 19 bp, Severe acute respiratory syndrome coronavirus 2
tcttgtgcagaatgaattc

SEQ ID NO: 1108 - DNA, 19 bp, Severe acute respiratory syndrome coronavirus 2
cttgtgcagaatgaattct

SEQ ID NO: 1109 - DNA, 19 bp, Severe acute respiratory syndrome coronavirus 2
ttgtgcagaatgaattctc

SEQ ID NO: 1110 - DNA, 19 bp, Severe acute respiratory syndrome coronavirus 2
tgtgcagaatgaattctcg

SEQ ID NO: 1111 - DNA, 19 bp, Severe acute respiratory syndrome coronavirus 2
gtgcagaatgaattctcgt

SEQ ID NO: 1112 - DNA, 19 bp, Severe acute respiratory syndrome coronavirus 2
tgcagaatgaattctcgta

SEQ ID NO: 1113 - DNA, 19 bp, Severe acute respiratory syndrome coronavirus 2
tagttaactttaatctcac

SEQ ID NO: 1114 - DNA, 19 bp, Severe acute respiratory syndrome coronavirus 2
agttaactttaatctcaca

SEQ ID NO: 1115 - DNA, 19 bp, Severe acute respiratory syndrome coronavirus 2
gttaactttaatctcacat

SEQ ID NO: 1116 - DNA, 19 bp, Severe acute respiratory syndrome coronavirus 2
ttaactttaatctcacata

SEQ ID NO: 1117 - DNA, 19 bp, Severe acute respiratory syndrome coronavirus 2
taactttaatctcacatag

SEQ ID NO: 1118 - DNA, 19 bp, Severe acute respiratory syndrome coronavirus 2
aactttaatctcacatagc

SEQ ID NO: 1119 - DNA, 19 bp, Severe acute respiratory syndrome coronavirus 2
actttaatctcacatagca

SEQ ID NO: 1120 - DNA, 19 bp, Severe acute respiratory syndrome coronavirus 2
ctttaatctcacatagcaa

SEQ ID NO: 1121 - DNA, 19 bp, Severe acute respiratory syndrome coronavirus 2
tttaatctcacatagcaat

SEQ ID NO: 1122 - DNA, 19 bp, Severe acute respiratory syndrome coronavirus 2
ttaatctcacatagcaatc

SEQ ID NO: 1123 - DNA, 19 bp, Severe acute respiratory syndrome coronavirus 2
taatctcacatagcaatct

SEQ ID NO: 1124 - DNA, 19 bp, Severe acute respiratory syndrome coronavirus 2
aatctcacatagcaatctt

SEQ ID NO: 1125 - DNA, 19 bp, Severe acute respiratory syndrome coronavirus 2
atctcacatagcaatcttt

SEQ ID NO: 1126 - DNA, 19 bp, Severe acute respiratory syndrome coronavirus 2
tctcacatagcaatcttta

SEQ ID NO: 1127 - DNA, 19 bp, Severe acute respiratory syndrome coronavirus 2
ctcacatagcaatctttaa

SEQ ID NO: 1128 - DNA, 19 bp, Severe acute respiratory syndrome coronavirus 2
tcacatagcaatctttaat

SEQ ID NO: 1129 - DNA, 19 bp, Severe acute respiratory syndrome coronavirus 2
cacatagcaatctttaatc

SEQ ID NO: 1130 - DNA, 19 bp, Severe acute respiratory syndrome coronavirus 2
acatagcaatctttaatca

SEQ ID NO: 1131 - DNA, 19 bp, Severe acute respiratory syndrome coronavirus 2
tgtgtaacattagggagga

SEQ ID NO: 1132 - DNA, 19 bp, Severe acute respiratory syndrome coronavirus 2
gtgtaacattagggaggac

SEQ ID NO: 1133 - DNA, 19 bp, Severe acute respiratory syndrome coronavirus 2
tgtaacattagggaggact

SEQ ID NO: 1134 - DNA, 19 bp, Severe acute respiratory syndrome coronavirus 2
gtaacattagggaggactt

SEQ ID NO: 1135 - DNA, 19 bp, Severe acute respiratory syndrome coronavirus 2
taacattagggaggacttg

SEQ ID NO: 1136 - DNA, 19 bp, Severe acute respiratory syndrome coronavirus 2
aacattagggaggacttga

SEQ ID NO: 1137 - DNA, 19 bp, Severe acute respiratory syndrome coronavirus 2
acattagggaggacttgaa

SEQ ID NO: 1138 - DNA, 19 bp, Severe acute respiratory syndrome coronavirus 2
cattagggaggacttgaaa

SEQ ID NO: 1139 - DNA, 19 bp, Severe acute respiratory syndrome coronavirus 2
attagggaggacttgaaag

SEQ ID NO: 1140 - DNA, 19 bp, Severe acute respiratory syndrome coronavirus 2
ttagggaggacttgaaaga

SEQ ID NO: 1141 - DNA, 19 bp, Severe acute respiratory syndrome coronavirus 2
tagggaggacttgaaagag

SEQ ID NO: 1142 - DNA, 19 bp, Severe acute respiratory syndrome coronavirus 2
agggaggacttgaaagagc

SEQ ID NO: 1143 - DNA, 19 bp, Severe acute respiratory syndrome coronavirus 2
gggaggacttgaaagagcc

SEQ ID NO: 1144 - DNA, 19 bp, Severe acute respiratory syndrome coronavirus 2
ggaggacttgaaagagcca

SEQ ID NO: 1145 - DNA, 19 bp, Severe acute respiratory syndrome coronavirus 2
gaggacttgaaagagccac

SEQ ID NO: 1146 - DNA, 19 bp, Severe acute respiratory syndrome coronavirus 2
aggacttgaaagagccacc

SEQ ID NO: 1147 - DNA, 19 bp, Severe acute respiratory syndrome coronavirus 2
ggacttgaaagagccacca

SEQ ID NO: 1148 - DNA, 19 bp, Severe acute respiratory syndrome coronavirus 2
gacttgaaagagccaccac

SEQ ID NO: 1149 - DNA, 19 bp, Severe acute respiratory syndrome coronavirus 2
acttgaaagagccaccaca

SEQ ID NO: 1150 - DNA, 19 bp, Severe acute respiratory syndrome coronavirus 2
cttgaaagagccaccacat

SEQ ID NO: 1151 - DNA, 19 bp, Severe acute respiratory syndrome coronavirus 2
ttgaaagagccaccacatt

SEQ ID NO: 1152 - DNA, 19 bp, Severe acute respiratory syndrome coronavirus 2
tgaaagagccaccacattt

SEQ ID NO: 1153 - DNA, 19 bp, Severe acute respiratory syndrome coronavirus 2
gaaagagccaccacatttt

SEQ ID NO: 1154 - DNA, 19 bp, Severe acute respiratory syndrome coronavirus 2
aaagagccaccacattttc

SEQ ID NO: 1155 - DNA, 19 bp, Severe acute respiratory syndrome coronavirus 2
aagagccaccacattttca

SEQ ID NO: 1156 - DNA, 19 bp, Severe acute respiratory syndrome coronavirus 2
cgaggccacgcggagtacg

SEQ ID NO: 1157 - DNA, 19 bp, Severe acute respiratory syndrome coronavirus 2
gaggccacgcggagtacga

SEQ ID NO: 1158 - DNA, 19 bp, Severe acute respiratory syndrome coronavirus 2
aggccacgcggagtacgat

SEQ ID NO: 1159 - DNA, 19 bp, Severe acute respiratory syndrome coronavirus 2
ggccacgcggagtacgatc

SEQ ID NO: 1160 - DNA, 19 bp, Severe acute respiratory syndrome coronavirus 2
gccacgcggagtacgatcg

SEQ ID NO: 1161 - DNA, 19 bp, Severe acute respiratory syndrome coronavirus 2
ccacgcggagtacgatcga

SEQ ID NO: 1162 - DNA, 19 bp, Severe acute respiratory syndrome coronavirus 2
cacgcggagtacgatcgag

SEQ ID NO: 1163 - DNA, 19 bp, Severe acute respiratory syndrome coronavirus 2
aatgctagggagagctgcc

SEQ ID NO: 1164 - DNA, 19 bp, Severe acute respiratory syndrome coronavirus 2
atgctagggagagctgcct

SEQ ID NO: 1165 - DNA, 19 bp, Severe acute respiratory syndrome coronavirus 2
tgctagggagagctgccta

SEQ ID NO: 1166 - DNA, 19 bp, Severe acute respiratory syndrome coronavirus 2
gctagggagagctgcctat

SEQ ID NO: 1167 - DNA, 19 bp, Severe acute respiratory syndrome coronavirus 2
ctagggagagctgcctata

SEQ ID NO: 1168 - DNA, 19 bp, Severe acute respiratory syndrome coronavirus 2
tagggagagctgcctatat

SEQ ID NO: 1169 - DNA, 19 bp, Severe acute respiratory syndrome coronavirus 2
agggagagctgcctatatg

SEQ ID NO: 1170 - DNA, 19 bp, Severe acute respiratory syndrome coronavirus 2
gggagagctgcctatatgg

SEQ ID NO: 1171 - DNA, 19 bp, Severe acute respiratory syndrome coronavirus 2
ggagagctgcctatatgga

SEQ ID NO: 1172 - DNA, 19 bp, Severe acute respiratory syndrome coronavirus 2
gagagctgcctatatggaa

SEQ ID NO: 1173 - DNA, 19 bp, Severe acute respiratory syndrome coronavirus 2
agagctgcctatatggaag

SEQ ID NO: 1174 - DNA, 19 bp, Severe acute respiratory syndrome coronavirus 2
gagctgcctatatggaaga

SEQ ID NO: 1175 - DNA, 19 bp, Severe acute respiratory syndrome coronavirus 2
agctgcctatatggaagag

SEQ ID NO: 1176 - DNA, 19 bp, Severe acute respiratory syndrome coronavirus 2
gctgcctatatggaagagc

SEQ ID NO: 1177 - DNA, 19 bp, Severe acute respiratory syndrome coronavirus 2
ctgcctatatggaagagcc

SEQ ID NO: 1178 - DNA, 19 bp, Severe acute respiratory syndrome coronavirus 2
tgcctatatggaagagccc

SEQ ID NO: 1179 - DNA, 19 bp, Severe acute respiratory syndrome coronavirus 2
gcctatatggaagagccct

SEQ ID NO: 1180 - DNA, 19 bp, Severe acute respiratory syndrome coronavirus 2
cctatatggaagagcccta

SEQ ID NO: 1181 - DNA, 19 bp, Severe acute respiratory syndrome coronavirus 2
ctatatggaagagccctaa

SEQ ID NO: 1182 - DNA, 19 bp, Severe acute respiratory syndrome coronavirus 2
tatatggaagagccctaat

SEQ ID NO: 1183 - DNA, 19 bp, Severe acute respiratory syndrome coronavirus 2
atatggaagagccctaatg

SEQ ID NO: 1184 - DNA, 19 bp, Severe acute respiratory syndrome coronavirus 2
tatggaagagccctaatgt

SEQ ID NO: 1185 - DNA, 19 bp, Severe acute respiratory syndrome coronavirus 2
atggaagagccctaatgtg

SEQ ID NO: 1186 - DNA, 19 bp, Severe acute respiratory syndrome coronavirus 2
tggaagagccctaatgtgt

SEQ ID NO: 1187 - DNA, 19 bp, Severe acute respiratory syndrome coronavirus 2
ggaagagccctaatgtgta

SEQ ID NO: 1188 - DNA, 19 bp, Severe acute respiratory syndrome coronavirus 2
gaagagccctaatgtgtaa

SEQ ID NO: 1189 - DNA, 19 bp, Severe acute respiratory syndrome coronavirus 2
aagagccctaatgtgtaaa

SEQ ID NO: 1190 - DNA, 19 bp, Severe acute respiratory syndrome coronavirus 2
agagccctaatgtgtaaaa

SEQ ID NO: 1191 - DNA, 19 bp, Severe acute respiratory syndrome coronavirus 2
gagccctaatgtgtaaaat

SEQ ID NO: 1192 - DNA, 19 bp, Severe acute respiratory syndrome coronavirus 2
agccctaatgtgtaaaatt

SEQ ID NO: 1193 - DNA, 19 bp, Severe acute respiratory syndrome coronavirus 2
gccctaatgtgtaaaatta

SEQ ID NO: 1194 - DNA, 19 bp, Severe acute respiratory syndrome coronavirus 2
ccctaatgtgtaaaattaa

SEQ ID NO: 1195 - DNA, 19 bp, Severe acute respiratory syndrome coronavirus 2
cctaatgtgtaaaattaat

SEQ ID NO: 1196 - DNA, 19 bp, Severe acute respiratory syndrome coronavirus 2
ctaatgtgtaaaattaatt

SEQ ID NO: 1197 - DNA, 19 bp, Severe acute respiratory syndrome coronavirus 2
taatgtgtaaaattaattt

SEQ ID NO: 1198 - DNA, 19 bp, Severe acute respiratory syndrome coronavirus 2
aatgtgtaaaattaatttt

SEQ ID NO: 1199 - DNA, 19 bp, Severe acute respiratory syndrome coronavirus 2
atgtgtaaaattaatttta

SEQ ID NO: 1200 - DNA, 19 bp, Severe acute respiratory syndrome coronavirus 2
tgtgtaaaattaattttag

SEQ ID NO: 1201 - DNA, 19 bp, Severe acute respiratory syndrome coronavirus 2
gtgtaaaattaattttagt

SEQ ID NO: 1202 - DNA, 19 bp, Severe acute respiratory syndrome coronavirus 2
tgtaaaattaattttagta

SEQ ID NO: 1203 - DNA, 19 bp, Severe acute respiratory syndrome coronavirus 2
gtaaaattaattttagtag

SEQ ID NO: 1204 - DNA, 19 bp, Severe acute respiratory syndrome coronavirus 2
cggacgaaaccgtaagcag

SEQ ID NO: 1205 - DNA, 19 bp, Severe acute respiratory syndrome coronavirus 2
acggacgaaaccgtaagca

SEQ ID NO: 1206 - DNA, 19 bp, Severe acute respiratory syndrome coronavirus 2
cacggacgaaaccgtaagc

SEQ ID NO: 1207 - DNA, 19 bp, Severe acute respiratory syndrome coronavirus 2
acacggacgaaaccgtaag

SEQ ID NO: 1208 - DNA, 19 bp, Severe acute respiratory syndrome coronavirus 2
aacacggacgaaaccgtaa

SEQ ID NO: 1209 - DNA, 19 bp, Severe acute respiratory syndrome coronavirus 2
caacacggacgaaaccgta

SEQ ID NO: 1210 - DNA, 19 bp, Severe acute respiratory syndrome coronavirus 2
gcaacacggacgaaaccgt

SEQ ID NO: 1211 - DNA, 19 bp, Severe acute respiratory syndrome coronavirus 2
tgcaacacggacgaaaccg

SEQ ID NO: 1212 - DNA, 19 bp, Severe acute respiratory syndrome coronavirus 2
ctgcaacacggacgaaacc

SEQ ID NO: 1213 - DNA, 19 bp, Severe acute respiratory syndrome coronavirus 2
acacccggacgaaacctag

SEQ ID NO: 1214 - DNA, 19 bp, Severe acute respiratory syndrome coronavirus 2
cacacccggacgaaaccta

SEQ ID NO: 1215 - DNA, 19 bp, Severe acute respiratory syndrome coronavirus 2
tcacacccggacgaaacct

SEQ ID NO: 1216 - DNA, 19 bp, Severe acute respiratory syndrome coronavirus 2
gtcacacccggacgaaacc

SEQ ID NO: 1217 - DNA, 19 bp, Severe acute respiratory syndrome coronavirus 2
ggtcacacccggacgaaac

SEQ ID NO: 1218 - DNA, 19 bp, Severe acute respiratory syndrome coronavirus 2
cggtcacacccggacgaaa

SEQ ID NO: 1219 - DNA, 19 bp, Severe acute respiratory syndrome coronavirus 2
tcggtcacacccggacgaa

SEQ ID NO: 1220 - DNA, 19 bp, Severe acute respiratory syndrome coronavirus 2
ttcggtcacacccggacga

SEQ ID NO: 1221 - DNA, 19 bp, Severe acute respiratory syndrome coronavirus 2
tttcggtcacacccggacg

SEQ ID NO: 1222 - DNA, 19 bp, Severe acute respiratory syndrome coronavirus 2
ctttcggtcacacccggac

SEQ ID NO: 1223 - DNA, 19 bp, Severe acute respiratory syndrome coronavirus 2
cctttcggtcacacccgga

SEQ ID NO: 1224 - DNA, 19 bp, Severe acute respiratory syndrome coronavirus 2
acctttcggtcacacccgg

SEQ ID NO: 1225 - DNA, 19 bp, Severe acute respiratory syndrome coronavirus 2
tacctttcggtcacacccg

SEQ ID NO: 1226 - DNA, 19 bp, Severe acute respiratory syndrome coronavirus 2
ttacctttcggtcacaccc

SEQ ID NO: 1227 - DNA, 19 bp, Severe acute respiratory syndrome coronavirus 2
cttacctttcggtcacacc

SEQ ID NO: 1228 - DNA, 19 bp, Severe acute respiratory syndrome coronavirus 2
tcttacctttcggtcacac

SEQ ID NO: 1229 - DNA, 19 bp, Severe acute respiratory syndrome coronavirus 2
atcttacctttcggtcaca

SEQ ID NO: 1230 - DNA, 19 bp, Severe acute respiratory syndrome coronavirus 2
catcttacctttcggtcac

SEQ ID NO: 1231 - DNA, 19 bp, Severe acute respiratory syndrome coronavirus 2
ccatcttacctttcggtca

SEQ ID NO: 1232 - DNA, 19 bp, Severe acute respiratory syndrome coronavirus 2
tccatcttacctttcggtc

SEQ ID NO: 1233 - DNA, 19 bp, Severe acute respiratory syndrome coronavirus 2
ctccatcttacctttcggt

SEQ ID NO: 1234 - DNA, 19 bp, Severe acute respiratory syndrome coronavirus 2
tctccatcttacctttcgg

SEQ ID NO: 1235 - DNA, 19 bp, Severe acute respiratory syndrome coronavirus 2
ctctccatcttacctttcg

SEQ ID NO: 1236 - DNA, 19 bp, Severe acute respiratory syndrome coronavirus 2
gctctccatcttacctttc

SEQ ID NO: 1237 - DNA, 19 bp, Severe acute respiratory syndrome coronavirus 2
ggctctccatcttaccttt

SEQ ID NO: 1238 - DNA, 19 bp, Severe acute respiratory syndrome coronavirus 2
aggctctccatcttacctt

SEQ ID NO: 1239 - DNA, 19 bp, Severe acute respiratory syndrome coronavirus 2
aaggctctccatcttacct

SEQ ID NO: 1240 - DNA, 19 bp, Severe acute respiratory syndrome coronavirus 2
caaggctctccatcttacc

SEQ ID NO: 1241 - DNA, 19 bp, Severe acute respiratory syndrome coronavirus 2
acaaggctctccatcttac

SEQ ID NO: 1242 - DNA, 19 bp, Severe acute respiratory syndrome coronavirus 2
acgtgtgttttctcgttga

SEQ ID NO: 1243 - DNA, 19 bp, Severe acute respiratory syndrome coronavirus 2
gacgtgtgttttctcgttg

SEQ ID NO: 1244 - DNA, 19 bp, Severe acute respiratory syndrome coronavirus 2
ggacgtgtgttttctcgtt

SEQ ID NO: 1245 - DNA, 19 bp, Severe acute respiratory syndrome coronavirus 2
tggacgtgtgttttctcgt

SEQ ID NO: 1246 - DNA, 19 bp, Severe acute respiratory syndrome coronavirus 2
ttggacgtgtgttttctcg

SEQ ID NO: 1247 - DNA, 19 bp, Severe acute respiratory syndrome coronavirus 2
gttggacgtgtgttttctc

SEQ ID NO: 1248 - DNA, 19 bp, Severe acute respiratory syndrome coronavirus 2
agttggacgtgtgttttct

SEQ ID NO: 1249 - DNA, 19 bp, Severe acute respiratory syndrome coronavirus 2
gagttggacgtgtgttttc

SEQ ID NO: 1250 - DNA, 19 bp, Severe acute respiratory syndrome coronavirus 2
tgagttggacgtgtgtttt

SEQ ID NO: 1251 - DNA, 19 bp, Severe acute respiratory syndrome coronavirus 2
ctgagttggacgtgtgttt

SEQ ID NO: 1252 - DNA, 19 bp, Severe acute respiratory syndrome coronavirus 2
actgagttggacgtgtgtt

SEQ ID NO: 1253 - DNA, 19 bp, Severe acute respiratory syndrome coronavirus 2
aactgagttggacgtgtgt

SEQ ID NO: 1254 - DNA, 19 bp, Severe acute respiratory syndrome coronavirus 2
aaactgagttggacgtgtg

SEQ ID NO: 1255 - DNA, 19 bp, Severe acute respiratory syndrome coronavirus 2
caaactgagttggacgtgt

SEQ ID NO: 1256 - DNA, 19 bp, Severe acute respiratory syndrome coronavirus 2
gcaaactgagttggacgtg

SEQ ID NO: 1257 - DNA, 19 bp, Severe acute respiratory syndrome coronavirus 2
ggcaaactgagttggacgt

SEQ ID NO: 1258 - DNA, 19 bp, Severe acute respiratory syndrome coronavirus 2
aggcaaactgagttggacg

SEQ ID NO: 1259 - DNA, 19 bp, Severe acute respiratory syndrome coronavirus 2
caggcaaactgagttggac

SEQ ID NO: 1260 - DNA, 19 bp, Severe acute respiratory syndrome coronavirus 2
acaggcaaactgagttgga

SEQ ID NO: 1261 - DNA, 19 bp, Severe acute respiratory syndrome coronavirus 2
acacatagggctgttcaag

SEQ ID NO: 1262 - DNA, 19 bp, Severe acute respiratory syndrome coronavirus 2
aacacatagggctgttcaa

SEQ ID NO: 1263 - DNA, 19 bp, Severe acute respiratory syndrome coronavirus 2
gaacacatagggctgttca

SEQ ID NO: 1264 - DNA, 19 bp, Severe acute respiratory syndrome coronavirus 2
tgaacacatagggctgttc

SEQ ID NO: 1265 - DNA, 19 bp, Severe acute respiratory syndrome coronavirus 2
atgaacacatagggctgtt

SEQ ID NO: 1266 - DNA, 19 bp, Severe acute respiratory syndrome coronavirus 2
cgttcttacgaagaagaac

SEQ ID NO: 1267 - DNA, 19 bp, Severe acute respiratory syndrome coronavirus 2
ccgttcttacgaagaagaa

SEQ ID NO: 1268 - DNA, 19 bp, Severe acute respiratory syndrome coronavirus 2
accgttcttacgaagaaga

SEQ ID NO: 1269 - DNA, 19 bp, Severe acute respiratory syndrome coronavirus 2
taccgttcttacgaagaag

SEQ ID NO: 1270 - DNA, 19 bp, Severe acute respiratory syndrome coronavirus 2
ttaccgttcttacgaagaa

SEQ ID NO: 1271 - DNA, 19 bp, Severe acute respiratory syndrome coronavirus 2
attaccgttcttacgaaga

SEQ ID NO: 1272 - DNA, 19 bp, Severe acute respiratory syndrome coronavirus 2
tattaccgttcttacgaag

SEQ ID NO: 1273 - DNA, 19 bp, Severe acute respiratory syndrome coronavirus 2
ttattaccgttcttacgaa

SEQ ID NO: 1274 - DNA, 19 bp, Severe acute respiratory syndrome coronavirus 2
gatcagtgccaagctcgtc

SEQ ID NO: 1275 - DNA, 19 bp, Severe acute respiratory syndrome coronavirus 2
ggatcagtgccaagctcgt

SEQ ID NO: 1276 - DNA, 19 bp, Severe acute respiratory syndrome coronavirus 2
agtaagttttaaataacca

SEQ ID NO: 1277 - DNA, 19 bp, Severe acute respiratory syndrome coronavirus 2
cagtaagttttaaataacc

SEQ ID NO: 1278 - DNA, 19 bp, Severe acute respiratory syndrome coronavirus 2
tcagtaagttttaaataac

SEQ ID NO: 1279 - DNA, 19 bp, Severe acute respiratory syndrome coronavirus 2
gtcagtaagttttaaataa

SEQ ID NO: 1280 - DNA, 19 bp, Severe acute respiratory syndrome coronavirus 2
tgtcagtaagttttaaata

SEQ ID NO: 1281 - DNA, 19 bp, Severe acute respiratory syndrome coronavirus 2
ttgtcagtaagttttaaat

SEQ ID NO: 1282 - DNA, 19 bp, Severe acute respiratory syndrome coronavirus 2
attgtcagtaagttttaaa

SEQ ID NO: 1283 - DNA, 19 bp, Severe acute respiratory syndrome coronavirus 2
cattgtcagtaagttttaa

SEQ ID NO: 1284 - DNA, 19 bp, Severe acute respiratory syndrome coronavirus 2
acattgtcagtaagtttta

SEQ ID NO: 1285 - DNA, 19 bp, Severe acute respiratory syndrome coronavirus 2
gtgcacaaaagttagcagc

SEQ ID NO: 1286 - DNA, 19 bp, Severe acute respiratory syndrome coronavirus 2
agtgcacaaaagttagcag

SEQ ID NO: 1287 - DNA, 19 bp, Severe acute respiratory syndrome coronavirus 2
ttccactacttcttcagag

SEQ ID NO: 1288 - DNA, 19 bp, Severe acute respiratory syndrome coronavirus 2
tttccactacttcttcaga

SEQ ID NO: 1289 - DNA, 19 bp, Severe acute respiratory syndrome coronavirus 2
ttttccactacttcttcag

SEQ ID NO: 1290 - DNA, 19 bp, Severe acute respiratory syndrome coronavirus 2
attttccactacttcttca

SEQ ID NO: 1291 - DNA, 19 bp, Severe acute respiratory syndrome coronavirus 2
gattttccactacttcttc

SEQ ID NO: 1292 - DNA, 19 bp, Severe acute respiratory syndrome coronavirus 2
ggattttccactacttctt

SEQ ID NO: 1293 - DNA, 19 bp, Severe acute respiratory syndrome coronavirus 2
aggattttccactacttct

SEQ ID NO: 1294 - DNA, 19 bp, Severe acute respiratory syndrome coronavirus 2
taggattttccactacttc

SEQ ID NO: 1295 - DNA, 19 bp, Severe acute respiratory syndrome coronavirus 2
gtaggattttccactactt

SEQ ID NO: 1296 - DNA, 19 bp, Severe acute respiratory syndrome coronavirus 2
ggtaggattttccactact

SEQ ID NO: 1297 - DNA, 19 bp, Severe acute respiratory syndrome coronavirus 2
caacttcggtagttttcac

SEQ ID NO: 1298 - DNA, 19 bp, Severe acute respiratory syndrome coronavirus 2
acaacttcggtagttttca

SEQ ID NO: 1299 - DNA, 19 bp, Severe acute respiratory syndrome coronavirus 2
tacaacttcggtagttttc

SEQ ID NO: 1300 - DNA, 19 bp, Severe acute respiratory syndrome coronavirus 2
ctacaacttcggtagtttt

SEQ ID NO: 1301 - DNA, 19 bp, Severe acute respiratory syndrome coronavirus 2
cctacaacttcggtagttt

SEQ ID NO: 1302 - DNA, 19 bp, Severe acute respiratory syndrome coronavirus 2
cattaacaatagttgtaca

SEQ ID NO: 1303 - DNA, 19 bp, Severe acute respiratory syndrome coronavirus 2
ccattaacaatagttgtac

SEQ ID NO: 1304 - DNA, 19 bp, Severe acute respiratory syndrome coronavirus 2
aatgtcaagtacaagtaaa

SEQ ID NO: 1305 - DNA, 19 bp, Severe acute respiratory syndrome coronavirus 2
aaccaacactaccacatga

SEQ ID NO: 1306 - DNA, 19 bp, Severe acute respiratory syndrome coronavirus 2
aaaccaacactaccacatg

SEQ ID NO: 1307 - DNA, 19 bp, Severe acute respiratory syndrome coronavirus 2
aaaaccaacactaccacat

SEQ ID NO: 1308 - DNA, 19 bp, Severe acute respiratory syndrome coronavirus 2
taaaaccaacactaccaca

SEQ ID NO: 1309 - DNA, 19 bp, Severe acute respiratory syndrome coronavirus 2
ttaaaaccaacactaccac

SEQ ID NO: 1310 - DNA, 19 bp, Severe acute respiratory syndrome coronavirus 2
gttaaaaccaacactacca

SEQ ID NO: 1311 - DNA, 19 bp, Severe acute respiratory syndrome coronavirus 2
tgttaaaaccaacactacc

SEQ ID NO: 1312 - DNA, 19 bp, Severe acute respiratory syndrome coronavirus 2
atgttaaaaccaacactac

SEQ ID NO: 1313 - DNA, 19 bp, Severe acute respiratory syndrome coronavirus 2
agcctaagaaacaataaac

SEQ ID NO: 1314 - DNA, 19 bp, Severe acute respiratory syndrome coronavirus 2
tagcctaagaaacaataaa

SEQ ID NO: 1315 - DNA, 19 bp, Severe acute respiratory syndrome coronavirus 2
atagcctaagaaacaataa

SEQ ID NO: 1316 - DNA, 19 bp, Severe acute respiratory syndrome coronavirus 2
aatagcctaagaaacaata

SEQ ID NO: 1317 - DNA, 19 bp, Severe acute respiratory syndrome coronavirus 2
acattttagactgtacagt

SEQ ID NO: 1318 - DNA, 19 bp, Severe acute respiratory syndrome coronavirus 2
gacattttagactgtacag

SEQ ID NO: 1319 - DNA, 19 bp, Severe acute respiratory syndrome coronavirus 2
ctacagcaccctgcatgga

SEQ ID NO: 1320 - DNA, 19 bp, Severe acute respiratory syndrome coronavirus 2
tctacagcaccctgcatgg

SEQ ID NO: 1321 - DNA, 19 bp, Severe acute respiratory syndrome coronavirus 2
gtctacagcaccctgcatg

SEQ ID NO: 1322 - DNA, 19 bp, Severe acute respiratory syndrome coronavirus 2
tgtctacagcaccctgcat

SEQ ID NO: 1323 - DNA, 19 bp, Severe acute respiratory syndrome coronavirus 2
atgtctacagcaccctgca

SEQ ID NO: 1324 - DNA, 19 bp, Severe acute respiratory syndrome coronavirus 2
atttagccacattcaaaga

SEQ ID NO: 1325 - DNA, 19 bp, Severe acute respiratory syndrome coronavirus 2
gatttagccacattcaaag

SEQ ID NO: 1326 - DNA, 19 bp, Severe acute respiratory syndrome coronavirus 2
agatttagccacattcaaa

SEQ ID NO: 1327 - DNA, 19 bp, Severe acute respiratory syndrome coronavirus 2
cagatttagccacattcaa

SEQ ID NO: 1328 - DNA, 19 bp, Severe acute respiratory syndrome coronavirus 2
tcagatttagccacattca

SEQ ID NO: 1329 - DNA, 19 bp, Severe acute respiratory syndrome coronavirus 2
cattgttgataatgttgtt

SEQ ID NO: 1330 - DNA, 19 bp, Severe acute respiratory syndrome coronavirus 2
gcattgttgataatgttgt

SEQ ID NO: 1331 - DNA, 19 bp, Severe acute respiratory syndrome coronavirus 2
tagggaatctagcccattt

SEQ ID NO: 1332 - DNA, 19 bp, Severe acute respiratory syndrome coronavirus 2
ttagggaatctagcccatt

SEQ ID NO: 1333 - DNA, 19 bp, Severe acute respiratory syndrome coronavirus 2
cttagggaatctagcccat

SEQ ID NO: 1334 - DNA, 19 bp, Severe acute respiratory syndrome coronavirus 2
tcttagggaatctagccca

SEQ ID NO: 1335 - DNA, 19 bp, Severe acute respiratory syndrome coronavirus 2
ctcttagggaatctagccc

SEQ ID NO: 1336 - DNA, 19 bp, Severe acute respiratory syndrome coronavirus 2
actcttagggaatctagcc

SEQ ID NO: 1337 - DNA, 19 bp, Severe acute respiratory syndrome coronavirus 2
cactcttagggaatctagc

SEQ ID NO: 1338 - DNA, 19 bp, Severe acute respiratory syndrome coronavirus 2
tcactcttagggaatctag

SEQ ID NO: 1339 - DNA, 19 bp, Severe acute respiratory syndrome coronavirus 2
atcactcttagggaatcta

SEQ ID NO: 1340 - DNA, 19 bp, Severe acute respiratory syndrome coronavirus 2
catcactcttagggaatct

SEQ ID NO: 1341 - DNA, 19 bp, Severe acute respiratory syndrome coronavirus 2
ccatcactcttagggaatc

SEQ ID NO: 1342 - DNA, 19 bp, Severe acute respiratory syndrome coronavirus 2
caaggtggttccagttctg

SEQ ID NO: 1343 - DNA, 19 bp, Severe acute respiratory syndrome coronavirus 2
acaaggtggttccagttct

SEQ ID NO: 1344 - DNA, 19 bp, Severe acute respiratory syndrome coronavirus 2
tacaaggtggttccagttc

SEQ ID NO: 1345 - DNA, 19 bp, Severe acute respiratory syndrome coronavirus 2
ctacaaggtggttccagtt

SEQ ID NO: 1346 - DNA, 19 bp, Severe acute respiratory syndrome coronavirus 2
cctacaaggtggttccagt

SEQ ID NO: 1347 - DNA, 19 bp, Severe acute respiratory syndrome coronavirus 2
acctacaaggtggttccag

SEQ ID NO: 1348 - DNA, 19 bp, Severe acute respiratory syndrome coronavirus 2
aacctacaaggtggttcca

SEQ ID NO: 1349 - DNA, 19 bp, Severe acute respiratory syndrome coronavirus 2
aaacctacaaggtggttcc

SEQ ID NO: 1350 - DNA, 19 bp, Severe acute respiratory syndrome coronavirus 2
caaacctacaaggtggttc

SEQ ID NO: 1351 - DNA, 19 bp, Severe acute respiratory syndrome coronavirus 2
acaaacctacaaggtggtt

SEQ ID NO: 1352 - DNA, 19 bp, Severe acute respiratory syndrome coronavirus 2
aacaaacctacaaggtggt

SEQ ID NO: 1353 - DNA, 19 bp, Severe acute respiratory syndrome coronavirus 2
taacaaacctacaaggtgg

SEQ ID NO: 1354 - DNA, 19 bp, Severe acute respiratory syndrome coronavirus 2
gtaacaaacctacaaggtg

SEQ ID NO: 1355 - DNA, 19 bp, Severe acute respiratory syndrome coronavirus 2
tgtaacaaacctacaaggt

SEQ ID NO: 1356 - DNA, 19 bp, Severe acute respiratory syndrome coronavirus 2
ctgtaacaaacctacaagg

SEQ ID NO: 1357 - DNA, 19 bp, Severe acute respiratory syndrome coronavirus 2
tctgtaacaaacctacaag

SEQ ID NO: 1358 - DNA, 19 bp, Severe acute respiratory syndrome coronavirus 2
gtctgtaacaaacctacaa

SEQ ID NO: 1359 - DNA, 19 bp, Severe acute respiratory syndrome coronavirus 2
tgtctgtaacaaacctaca

SEQ ID NO: 1360 - DNA, 19 bp, Severe acute respiratory syndrome coronavirus 2
gtgtctgtaacaaacctac

SEQ ID NO: 1361 - DNA, 19 bp, Severe acute respiratory syndrome coronavirus 2
tgtgtctgtaacaaaccta

SEQ ID NO: 1362 - DNA, 19 bp, Severe acute respiratory syndrome coronavirus 2
gtgtgtctgtaacaaacct

SEQ ID NO: 1363 - DNA, 19 bp, Severe acute respiratory syndrome coronavirus 2
ggtgtgtctgtaacaaacc

SEQ ID NO: 1364 - DNA, 19 bp, Severe acute respiratory syndrome coronavirus 2
cctctatttaggttgttta

SEQ ID NO: 1365 - DNA, 19 bp, Severe acute respiratory syndrome coronavirus 2
acctctatttaggttgttt

SEQ ID NO: 1366 - DNA, 19 bp, Severe acute respiratory syndrome coronavirus 2
tacctctatttaggttgtt

SEQ ID NO: 1367 - DNA, 19 bp, Severe acute respiratory syndrome coronavirus 2
atacctctatttaggttgt

SEQ ID NO: 1368 - DNA, 19 bp, Severe acute respiratory syndrome coronavirus 2
catacctctatttaggttg

SEQ ID NO: 1369 - DNA, 19 bp, Severe acute respiratory syndrome coronavirus 2
ccatacctctatttaggtt

SEQ ID NO: 1370 - DNA, 19 bp, Severe acute respiratory syndrome coronavirus 2
accatacctctatttaggt

SEQ ID NO: 1371 - DNA, 19 bp, Severe acute respiratory syndrome coronavirus 2
tgtgtgtacacaacatctt

SEQ ID NO: 1372 - DNA, 19 bp, Severe acute respiratory syndrome coronavirus 2
gtgtgtgtacacaacatct

SEQ ID NO: 1373 - DNA, 19 bp, Severe acute respiratory syndrome coronavirus 2
agtgtgtgtacacaacatc

SEQ ID NO: 1374 - DNA, 19 bp, Severe acute respiratory syndrome coronavirus 2
cagtgtgtgtacacaacat

SEQ ID NO: 1375 - DNA, 19 bp, Severe acute respiratory syndrome coronavirus 2
ccagtgtgtgtacacaaca

SEQ ID NO: 1376 - DNA, 19 bp, Severe acute respiratory syndrome coronavirus 2
accagtgtgtgtacacaac

SEQ ID NO: 1377 - DNA, 19 bp, Severe acute respiratory syndrome coronavirus 2
taccagtgtgtgtacacaa

SEQ ID NO: 1378 - DNA, 19 bp, Severe acute respiratory syndrome coronavirus 2
gtaccagtgtgtgtacaca

SEQ ID NO: 1379 - DNA, 19 bp, Severe acute respiratory syndrome coronavirus 2
gacggtacagactgtgttt

SEQ ID NO: 1380 - DNA, 19 bp, Severe acute respiratory syndrome coronavirus 2
agacggtacagactgtgtt

SEQ ID NO: 1381 - DNA, 19 bp, Severe acute respiratory syndrome coronavirus 2
cagacggtacagactgtgt

SEQ ID NO: 1382 - DNA, 19 bp, Severe acute respiratory syndrome coronavirus 2
gcagacggtacagactgtg

SEQ ID NO: 1383 - DNA, 19 bp, Severe acute respiratory syndrome coronavirus 2
cgcagacggtacagactgt

SEQ ID NO: 1384 - DNA, 19 bp, Severe acute respiratory syndrome coronavirus 2
ccgcagacggtacagactg

SEQ ID NO: 1385 - DNA, 19 bp, Severe acute respiratory syndrome coronavirus 2
agccataacctttccacat

SEQ ID NO: 1386 - DNA, 19 bp, Severe acute respiratory syndrome coronavirus 2
cagccataacctttccaca

SEQ ID NO: 1387 - DNA, 19 bp, Severe acute respiratory syndrome coronavirus 2
acagccataacctttccac

SEQ ID NO: 1388 - DNA, 19 bp, Severe acute respiratory syndrome coronavirus 2
tacagccataacctttcca

SEQ ID NO: 1389 - DNA, 19 bp, Severe acute respiratory syndrome coronavirus 2
ctacagccataacctttcc

SEQ ID NO: 1390 - DNA, 19 bp, Severe acute respiratory syndrome coronavirus 2
actacagccataacctttc

SEQ ID NO: 1391 - DNA, 19 bp, Severe acute respiratory syndrome coronavirus 2
aactacagccataaccttt

SEQ ID NO: 1392 - DNA, 19 bp, Severe acute respiratory syndrome coronavirus 2
caactacagccataacctt

SEQ ID NO: 1393 - DNA, 19 bp, Severe acute respiratory syndrome coronavirus 2
acaactacagccataacct

SEQ ID NO: 1394 - DNA, 19 bp, Severe acute respiratory syndrome coronavirus 2
cacaactacagccataacc

SEQ ID NO: 1395 - DNA, 19 bp, Severe acute respiratory syndrome coronavirus 2
tcacaactacagccataac

SEQ ID NO: 1396 - DNA, 19 bp, Severe acute respiratory syndrome coronavirus 2
gcaaacccgtttaaaaacg

SEQ ID NO: 1397 - DNA, 19 bp, Severe acute respiratory syndrome coronavirus 2
cgcaaacccgtttaaaaac

SEQ ID NO: 1398 - DNA, 19 bp, Severe acute respiratory syndrome coronavirus 2
ccgcaaacccgtttaaaaa

SEQ ID NO: 1399 - DNA, 19 bp, Severe acute respiratory syndrome coronavirus 2
accgcaaacccgtttaaaa

SEQ ID NO: 1400 - DNA, 19 bp, Severe acute respiratory syndrome coronavirus 2
caccgcaaacccgtttaaa

SEQ ID NO: 1401 - DNA, 19 bp, Severe acute respiratory syndrome coronavirus 2
acaccgcaaacccgtttaa

SEQ ID NO: 1402 - DNA, 19 bp, Severe acute respiratory syndrome coronavirus 2
tacaccgcaaacccgttta

SEQ ID NO: 1403 - DNA, 19 bp, Severe acute respiratory syndrome coronavirus 2
ttacaccgcaaacccgttt

SEQ ID NO: 1404 - DNA, 19 bp, Severe acute respiratory syndrome coronavirus 2
cttacaccgcaaacccgtt

SEQ ID NO: 1405 - DNA, 19 bp, Severe acute respiratory syndrome coronavirus 2
acttacaccgcaaacccgt

SEQ ID NO: 1406 - DNA, 19 bp, Severe acute respiratory syndrome coronavirus 2
cacttacaccgcaaacccg

SEQ ID NO: 1407 - DNA, 19 bp, Severe acute respiratory syndrome coronavirus 2
gcacttacaccgcaaaccc

SEQ ID NO: 1408 - DNA, 19 bp, Severe acute respiratory syndrome coronavirus 2
tgcacttacaccgcaaacc

SEQ ID NO: 1409 - DNA, 19 bp, Severe acute respiratory syndrome coronavirus 2
ctgcacttacaccgcaaac

SEQ ID NO: 1410 - DNA, 19 bp, Severe acute respiratory syndrome coronavirus 2
gctgcacttacaccgcaaa

SEQ ID NO: 1411 - DNA, 19 bp, Severe acute respiratory syndrome coronavirus 2
ggctgcacttacaccgcaa

SEQ ID NO: 1412 - DNA, 19 bp, Severe acute respiratory syndrome coronavirus 2
gggctgcacttacaccgca

SEQ ID NO: 1413 - DNA, 19 bp, Severe acute respiratory syndrome coronavirus 2
cgggctgcacttacaccgc

SEQ ID NO: 1414 - DNA, 19 bp, Severe acute respiratory syndrome coronavirus 2
acgggctgcacttacaccg

SEQ ID NO: 1415 - DNA, 19 bp, Severe acute respiratory syndrome coronavirus 2
gacgggctgcacttacacc

SEQ ID NO: 1416 - DNA, 19 bp, Severe acute respiratory syndrome coronavirus 2
agacgggctgcacttacac

SEQ ID NO: 1417 - DNA, 19 bp, Severe acute respiratory syndrome coronavirus 2
aagacgggctgcacttaca

SEQ ID NO: 1418 - DNA, 19 bp, Severe acute respiratory syndrome coronavirus 2
taagacgggctgcacttac

SEQ ID NO: 1419 - DNA, 19 bp, Severe acute respiratory syndrome coronavirus 2
gtaagacgggctgcactta

SEQ ID NO: 1420 - DNA, 19 bp, Severe acute respiratory syndrome coronavirus 2
tgtaagacgggctgcactt

SEQ ID NO: 1421 - DNA, 19 bp, Severe acute respiratory syndrome coronavirus 2
gtgtaagacgggctgcact

SEQ ID NO: 1422 - DNA, 19 bp, Severe acute respiratory syndrome coronavirus 2
ggtgtaagacgggctgcac

SEQ ID NO: 1423 - DNA, 19 bp, Severe acute respiratory syndrome coronavirus 2
cggtgtaagacgggctgca

SEQ ID NO: 1424 - DNA, 19 bp, Severe acute respiratory syndrome coronavirus 2
acggtgtaagacgggctgc

SEQ ID NO: 1425 - DNA, 19 bp, Severe acute respiratory syndrome coronavirus 2
cacggtgtaagacgggctg

SEQ ID NO: 1426 - DNA, 19 bp, Severe acute respiratory syndrome coronavirus 2
gcacggtgtaagacgggct

SEQ ID NO: 1427 - DNA, 19 bp, Severe acute respiratory syndrome coronavirus 2
cgcacggtgtaagacgggc

SEQ ID NO: 1428 - DNA, 19 bp, Severe acute respiratory syndrome coronavirus 2
ccgcacggtgtaagacggg

SEQ ID NO: 1429 - DNA, 19 bp, Severe acute respiratory syndrome coronavirus 2
gccgcacggtgtaagacgg

SEQ ID NO: 1430 - DNA, 19 bp, Severe acute respiratory syndrome coronavirus 2
tgccgcacggtgtaagacg

SEQ ID NO: 1431 - DNA, 19 bp, Severe acute respiratory syndrome coronavirus 2
gtgccgcacggtgtaagac

SEQ ID NO: 1432 - DNA, 19 bp, Severe acute respiratory syndrome coronavirus 2
tgtgccgcacggtgtaaga

SEQ ID NO: 1433 - DNA, 19 bp, Severe acute respiratory syndrome coronavirus 2
ctgtgccgcacggtgtaag

SEQ ID NO: 1434 - DNA, 19 bp, Severe acute respiratory syndrome coronavirus 2
cctgtgccgcacggtgtaa

SEQ ID NO: 1435 - DNA, 19 bp, Severe acute respiratory syndrome coronavirus 2
gcctgtgccgcacggtgta

SEQ ID NO: 1436 - DNA, 19 bp, Severe acute respiratory syndrome coronavirus 2
tgcctgtgccgcacggtgt

SEQ ID NO: 1437 - DNA, 19 bp, Severe acute respiratory syndrome coronavirus 2
gtgcctgtgccgcacggtg

SEQ ID NO: 1438 - DNA, 19 bp, Severe acute respiratory syndrome coronavirus 2
agtgcctgtgccgcacggt

SEQ ID NO: 1439 - DNA, 19 bp, Severe acute respiratory syndrome coronavirus 2
tagtgcctgtgccgcacgg

SEQ ID NO: 1440 - DNA, 19 bp, Severe acute respiratory syndrome coronavirus 2
ctagtgcctgtgccgcacg

SEQ ID NO: 1441 - DNA, 19 bp, Severe acute respiratory syndrome coronavirus 2
tatgtggtaccatgtcacc

SEQ ID NO: 1442 - DNA, 19 bp, Severe acute respiratory syndrome coronavirus 2
atatgtggtaccatgtcac

SEQ ID NO: 1443 - DNA, 19 bp, Severe acute respiratory syndrome coronavirus 2
tatatgtggtaccatgtca

SEQ ID NO: 1444 - DNA, 19 bp, Severe acute respiratory syndrome coronavirus 2
atatatgtggtaccatgtc

SEQ ID NO: 1445 - DNA, 19 bp, Severe acute respiratory syndrome coronavirus 2
gatatatgtggtaccatgt

SEQ ID NO: 1446 - DNA, 19 bp, Severe acute respiratory syndrome coronavirus 2
tgatatatgtggtaccatg

SEQ ID NO: 1447 - DNA, 19 bp, Severe acute respiratory syndrome coronavirus 2
gtgatatatgtggtaccat

SEQ ID NO: 1448 - DNA, 19 bp, Severe acute respiratory syndrome coronavirus 2
cgtgatatatgtggtacca

SEQ ID NO: 1449 - DNA, 19 bp, Severe acute respiratory syndrome coronavirus 2
acgtgatatatgtggtacc

SEQ ID NO: 1450 - DNA, 19 bp, Severe acute respiratory syndrome coronavirus 2
gacgtgatatatgtggtac

SEQ ID NO: 1451 - DNA, 19 bp, Severe acute respiratory syndrome coronavirus 2
tgacgtgatatatgtggta

SEQ ID NO: 1452 - DNA, 19 bp, Severe acute respiratory syndrome coronavirus 2
aatatttaaaataacggtc

SEQ ID NO: 1453 - DNA, 19 bp, Severe acute respiratory syndrome coronavirus 2
caatatttaaaataacggt

SEQ ID NO: 1454 - DNA, 19 bp, Severe acute respiratory syndrome coronavirus 2
ccaatatttaaaataacgg

SEQ ID NO: 1455 - DNA, 19 bp, Severe acute respiratory syndrome coronavirus 2
cccaatatttaaaataacg

SEQ ID NO: 1456 - DNA, 19 bp, Severe acute respiratory syndrome coronavirus 2
tcccaatatttaaaataac

SEQ ID NO: 1457 - DNA, 19 bp, Severe acute respiratory syndrome coronavirus 2
gtccaaaacttgtaggtgg

SEQ ID NO: 1458 - DNA, 19 bp, Severe acute respiratory syndrome coronavirus 2
ggtccaaaacttgtaggtg

SEQ ID NO: 1459 - DNA, 19 bp, Severe acute respiratory syndrome coronavirus 2
tggtccaaaacttgtaggt

SEQ ID NO: 1460 - DNA, 19 bp, Severe acute respiratory syndrome coronavirus 2
gtggtccaaaacttgtagg

SEQ ID NO: 1461 - DNA, 19 bp, Severe acute respiratory syndrome coronavirus 2
agtggtccaaaacttgtag

SEQ ID NO: 1462 - DNA, 19 bp, Severe acute respiratory syndrome coronavirus 2
tagtggtccaaaacttgta

SEQ ID NO: 1463 - DNA, 19 bp, Severe acute respiratory syndrome coronavirus 2
ctagtggtccaaaacttgt

SEQ ID NO: 1464 - DNA, 19 bp, Severe acute respiratory syndrome coronavirus 2
actagtggtccaaaacttg

SEQ ID NO: 1465 - DNA, 19 bp, Severe acute respiratory syndrome coronavirus 2
ttacatcctgattatgtac

SEQ ID NO: 1466 - DNA, 19 bp, Severe acute respiratory syndrome coronavirus 2
tttacatcctgattatgta

SEQ ID NO: 1467 - DNA, 19 bp, Severe acute respiratory syndrome coronavirus 2
gtttacatcctgattatgt

SEQ ID NO: 1468 - DNA, 19 bp, Severe acute respiratory syndrome coronavirus 2
agtttacatcctgattatg

SEQ ID NO: 1469 - DNA, 19 bp, Severe acute respiratory syndrome coronavirus 2
aagtttacatcctgattat

SEQ ID NO: 1470 - DNA, 19 bp, Severe acute respiratory syndrome coronavirus 2
taagtttacatcctgatta

SEQ ID NO: 1471 - DNA, 19 bp, Severe acute respiratory syndrome coronavirus 2
gtaagtttacatcctgatt

SEQ ID NO: 1472 - DNA, 19 bp, Severe acute respiratory syndrome coronavirus 2
tgtaagtttacatcctgat

SEQ ID NO: 1473 - DNA, 19 bp, Severe acute respiratory syndrome coronavirus 2
atgtaagtttacatcctga

SEQ ID NO: 1474 - DNA, 19 bp, Severe acute respiratory syndrome coronavirus 2
tatgtaagtttacatcctg

SEQ ID NO: 1475 - DNA, 19 bp, Severe acute respiratory syndrome coronavirus 2
ctatgtaagtttacatcct

SEQ ID NO: 1476 - DNA, 19 bp, Severe acute respiratory syndrome coronavirus 2
gctatgtaagtttacatcc

SEQ ID NO: 1477 - DNA, 19 bp, Severe acute respiratory syndrome coronavirus 2
agctatgtaagtttacatc

SEQ ID NO: 1478 - DNA, 19 bp, Severe acute respiratory syndrome coronavirus 2
gagctatgtaagtttacat

SEQ ID NO: 1479 - DNA, 19 bp, Severe acute respiratory syndrome coronavirus 2
gtgcagctactgaaaagca

SEQ ID NO: 1480 - DNA, 19 bp, Severe acute respiratory syndrome coronavirus 2
agtgcagctactgaaaagc

SEQ ID NO: 1481 - DNA, 19 bp, Severe acute respiratory syndrome coronavirus 2
cagtttgaaaagcaacatt

SEQ ID NO: 1482 - DNA, 19 bp, Severe acute respiratory syndrome coronavirus 2
acagtttgaaaagcaacat

SEQ ID NO: 1483 - DNA, 19 bp, Severe acute respiratory syndrome coronavirus 2
gacagtttgaaaagcaaca

SEQ ID NO: 1484 - DNA, 19 bp, Severe acute respiratory syndrome coronavirus 2
tgacagtttgaaaagcaac

SEQ ID NO: 1485 - DNA, 19 bp, Severe acute respiratory syndrome coronavirus 2
ttgacagtttgaaaagcaa

SEQ ID NO: 1486 - DNA, 19 bp, Severe acute respiratory syndrome coronavirus 2
tttgacagtttgaaaagca

SEQ ID NO: 1487 - DNA, 19 bp, Severe acute respiratory syndrome coronavirus 2
gtttgacagtttgaaaagc

SEQ ID NO: 1488 - DNA, 19 bp, Severe acute respiratory syndrome coronavirus 2
ggtttgacagtttgaaaag

SEQ ID NO: 1489 - DNA, 19 bp, Severe acute respiratory syndrome coronavirus 2
gggtttgacagtttgaaaa

SEQ ID NO: 1490 - DNA, 19 bp, Severe acute respiratory syndrome coronavirus 2
cgggtttgacagtttgaaa

SEQ ID NO: 1491 - DNA, 19 bp, Severe acute respiratory syndrome coronavirus 2
ccgggtttgacagtttgaa

SEQ ID NO: 1492 - DNA, 19 bp, Severe acute respiratory syndrome coronavirus 2
accgggtttgacagtttga

SEQ ID NO: 1493 - DNA, 19 bp, Severe acute respiratory syndrome coronavirus 2
taccgggtttgacagtttg

SEQ ID NO: 1494 - DNA, 19 bp, Severe acute respiratory syndrome coronavirus 2
ttaccgggtttgacagttt

SEQ ID NO: 1495 - DNA, 19 bp, Severe acute respiratory syndrome coronavirus 2
attaccgggtttgacagtt

SEQ ID NO: 1496 - DNA, 19 bp, Severe acute respiratory syndrome coronavirus 2
aattaccgggtttgacagt

SEQ ID NO: 1497 - DNA, 19 bp, Severe acute respiratory syndrome coronavirus 2
aaattaccgggtttgacag

SEQ ID NO: 1498 - DNA, 19 bp, Severe acute respiratory syndrome coronavirus 2
aaaattaccgggtttgaca

SEQ ID NO: 1499 - DNA, 19 bp, Severe acute respiratory syndrome coronavirus 2
taaaattaccgggtttgac

SEQ ID NO: 1500 - DNA, 19 bp, Severe acute respiratory syndrome coronavirus 2
ttaaaattaccgggtttga

SEQ ID NO: 1501 - DNA, 19 bp, Severe acute respiratory syndrome coronavirus 2
tagacacagcaaagtcata

SEQ ID NO: 1502 - DNA, 19 bp, Severe acute respiratory syndrome coronavirus 2
ttagacacagcaaagtcat

SEQ ID NO: 1503 - DNA, 19 bp, Severe acute respiratory syndrome coronavirus 2
aacttccttccttaaagaa

SEQ ID NO: 1504 - DNA, 19 bp, Severe acute respiratory syndrome coronavirus 2
gaacttccttccttaaaga

SEQ ID NO: 1505 - DNA, 19 bp, Severe acute respiratory syndrome coronavirus 2
agaacttccttccttaaag

SEQ ID NO: 1506 - DNA, 19 bp, Severe acute respiratory syndrome coronavirus 2
cagaacttccttccttaaa

SEQ ID NO: 1507 - DNA, 19 bp, Severe acute respiratory syndrome coronavirus 2
acagaacttccttccttaa

SEQ ID NO: 1508 - DNA, 19 bp, Severe acute respiratory syndrome coronavirus 2
aacagaacttccttcctta

SEQ ID NO: 1509 - DNA, 19 bp, Severe acute respiratory syndrome coronavirus 2
caacagaacttccttcctt

SEQ ID NO: 1510 - DNA, 19 bp, Severe acute respiratory syndrome coronavirus 2
tcaacagaacttccttcct

SEQ ID NO: 1511 - DNA, 19 bp, Severe acute respiratory syndrome coronavirus 2
ttcaacagaacttccttcc

SEQ ID NO: 1512 - DNA, 19 bp, Severe acute respiratory syndrome coronavirus 2
gcaaagaagaagtgtttta

SEQ ID NO: 1513 - DNA, 19 bp, Severe acute respiratory syndrome coronavirus 2
agcaaagaagaagtgtttt

SEQ ID NO: 1514 - DNA, 19 bp, Severe acute respiratory syndrome coronavirus 2
gagcaaagaagaagtgttt

SEQ ID NO: 1515 - DNA, 19 bp, Severe acute respiratory syndrome coronavirus 2
tgagcaaagaagaagtgtt

SEQ ID NO: 1516 - DNA, 19 bp, Severe acute respiratory syndrome coronavirus 2
ctgagcaaagaagaagtgt

SEQ ID NO: 1517 - DNA, 19 bp, Severe acute respiratory syndrome coronavirus 2
cctgagcaaagaagaagtg

SEQ ID NO: 1518 - DNA, 19 bp, Severe acute respiratory syndrome coronavirus 2
tcctgagcaaagaagaagt

SEQ ID NO: 1519 - DNA, 19 bp, Severe acute respiratory syndrome coronavirus 2
atcctgagcaaagaagaag

SEQ ID NO: 1520 - DNA, 19 bp, Severe acute respiratory syndrome coronavirus 2
catcctgagcaaagaagaa

SEQ ID NO: 1521 - DNA, 19 bp, Severe acute respiratory syndrome coronavirus 2
ccatcctgagcaaagaaga

SEQ ID NO: 1522 - DNA, 19 bp, Severe acute respiratory syndrome coronavirus 2
tgatatcacacattgttgg

SEQ ID NO: 1523 - DNA, 19 bp, Severe acute respiratory syndrome coronavirus 2
ctgatatcacacattgttg

SEQ ID NO: 1524 - DNA, 19 bp, Severe acute respiratory syndrome coronavirus 2
tctgatatcacacattgtt

SEQ ID NO: 1525 - DNA, 19 bp, Severe acute respiratory syndrome coronavirus 2
gtctgatatcacacattgt

SEQ ID NO: 1526 - DNA, 19 bp, Severe acute respiratory syndrome coronavirus 2
tgtctgatatcacacattg

SEQ ID NO: 1527 - DNA, 19 bp, Severe acute respiratory syndrome coronavirus 2
ttgtctgatatcacacatt

SEQ ID NO: 1528 - DNA, 19 bp, Severe acute respiratory syndrome coronavirus 2
gttgtctgatatcacacat

SEQ ID NO: 1529 - DNA, 19 bp, Severe acute respiratory syndrome coronavirus 2
agttgtctgatatcacaca

SEQ ID NO: 1530 - DNA, 19 bp, Severe acute respiratory syndrome coronavirus 2
tatcaacaacttcaactac

SEQ ID NO: 1531 - DNA, 19 bp, Severe acute respiratory syndrome coronavirus 2
ttatcaacaacttcaacta

SEQ ID NO: 1532 - DNA, 19 bp, Severe acute respiratory syndrome coronavirus 2
catcgtaacaatcaaagta

SEQ ID NO: 1533 - DNA, 19 bp, Severe acute respiratory syndrome coronavirus 2
ccatcgtaacaatcaaagt

SEQ ID NO: 1534 - DNA, 19 bp, Severe acute respiratory syndrome coronavirus 2
accatcgtaacaatcaaag

SEQ ID NO: 1535 - DNA, 19 bp, Severe acute respiratory syndrome coronavirus 2
caccatcgtaacaatcaaa

SEQ ID NO: 1536 - DNA, 19 bp, Severe acute respiratory syndrome coronavirus 2
ccaccatcgtaacaatcaa

SEQ ID NO: 1537 - DNA, 19 bp, Severe acute respiratory syndrome coronavirus 2
gccaccatcgtaacaatca

SEQ ID NO: 1538 - DNA, 19 bp, Severe acute respiratory syndrome coronavirus 2
agccaccatcgtaacaatc

SEQ ID NO: 1539 - DNA, 19 bp, Severe acute respiratory syndrome coronavirus 2
cagccaccatcgtaacaat

SEQ ID NO: 1540 - DNA, 19 bp, Severe acute respiratory syndrome coronavirus 2
acagccaccatcgtaacaa

SEQ ID NO: 1541 - DNA, 19 bp, Severe acute respiratory syndrome coronavirus 2
tacagccaccatcgtaaca

SEQ ID NO: 1542 - DNA, 19 bp, Severe acute respiratory syndrome coronavirus 2
atacagccaccatcgtaac

SEQ ID NO: 1543 - DNA, 19 bp, Severe acute respiratory syndrome coronavirus 2
gtctagccttaccccattt

SEQ ID NO: 1544 - DNA, 19 bp, Severe acute respiratory syndrome coronavirus 2
agtctagccttaccccatt

SEQ ID NO: 1545 - DNA, 19 bp, Severe acute respiratory syndrome coronavirus 2
aagtctagccttaccccat

SEQ ID NO: 1546 - DNA, 19 bp, Severe acute respiratory syndrome coronavirus 2
aaagtctagccttacccca

SEQ ID NO: 1547 - DNA, 19 bp, Severe acute respiratory syndrome coronavirus 2
taaagtctagccttacccc

SEQ ID NO: 1548 - DNA, 19 bp, Severe acute respiratory syndrome coronavirus 2
ataaagtctagccttaccc

SEQ ID NO: 1549 - DNA, 19 bp, Severe acute respiratory syndrome coronavirus 2
aataaagtctagccttacc

SEQ ID NO: 1550 - DNA, 19 bp, Severe acute respiratory syndrome coronavirus 2
taataaagtctagccttac

SEQ ID NO: 1551 - DNA, 19 bp, Severe acute respiratory syndrome coronavirus 2
ataataaagtctagcctta

SEQ ID NO: 1552 - DNA, 19 bp, Severe acute respiratory syndrome coronavirus 2
cataataaagtctagcctt

SEQ ID NO: 1553 - DNA, 19 bp, Severe acute respiratory syndrome coronavirus 2
tcataataaagtctagcct

SEQ ID NO: 1554 - DNA, 19 bp, Severe acute respiratory syndrome coronavirus 2
gatcctcataactcattga

SEQ ID NO: 1555 - DNA, 19 bp, Severe acute respiratory syndrome coronavirus 2
tgatcctcataactcattg

SEQ ID NO: 1556 - DNA, 19 bp, Severe acute respiratory syndrome coronavirus 2
ttgatcctcataactcatt

SEQ ID NO: 1557 - DNA, 19 bp, Severe acute respiratory syndrome coronavirus 2
cttgatcctcataactcat

SEQ ID NO: 1558 - DNA, 19 bp, Severe acute respiratory syndrome coronavirus 2
tcttgatcctcataactca

SEQ ID NO: 1559 - DNA, 19 bp, Severe acute respiratory syndrome coronavirus 2
atcttgatcctcataactc

SEQ ID NO: 1560 - DNA, 19 bp, Severe acute respiratory syndrome coronavirus 2
catcttgatcctcataact

SEQ ID NO: 1561 - DNA, 19 bp, Severe acute respiratory syndrome coronavirus 2
gcatcttgatcctcataac

SEQ ID NO: 1562 - DNA, 19 bp, Severe acute respiratory syndrome coronavirus 2
tgcatcttgatcctcataa

SEQ ID NO: 1563 - DNA, 19 bp, Severe acute respiratory syndrome coronavirus 2
gtgcatcttgatcctcata

SEQ ID NO: 1564 - DNA, 19 bp, Severe acute respiratory syndrome coronavirus 2
agtgcatcttgatcctcat

SEQ ID NO: 1565 - DNA, 19 bp, Severe acute respiratory syndrome coronavirus 2
taagattcatttgagttat

SEQ ID NO: 1566 - DNA, 19 bp, Severe acute respiratory syndrome coronavirus 2
ttaagattcatttgagtta

SEQ ID NO: 1567 - DNA, 19 bp, Severe acute respiratory syndrome coronavirus 2
cttaagattcatttgagtt

SEQ ID NO: 1568 - DNA, 19 bp, Severe acute respiratory syndrome coronavirus 2
acttaagattcatttgagt

SEQ ID NO: 1569 - DNA, 19 bp, Severe acute respiratory syndrome coronavirus 2
tacttaagattcatttgag

SEQ ID NO: 1570 - DNA, 19 bp, Severe acute respiratory syndrome coronavirus 2
atacttaagattcatttga

SEQ ID NO: 1571 - DNA, 19 bp, Severe acute respiratory syndrome coronavirus 2
catacttaagattcatttg

SEQ ID NO: 1572 - DNA, 19 bp, Severe acute respiratory syndrome coronavirus 2
gcatacttaagattcattt

SEQ ID NO: 1573 - DNA, 19 bp, Severe acute respiratory syndrome coronavirus 2
ggcatacttaagattcatt

SEQ ID NO: 1574 - DNA, 19 bp, Severe acute respiratory syndrome coronavirus 2
tggcatacttaagattcat

SEQ ID NO: 1575 - DNA, 19 bp, Severe acute respiratory syndrome coronavirus 2
atggcatacttaagattca

SEQ ID NO: 1576 - DNA, 19 bp, Severe acute respiratory syndrome coronavirus 2
aatggcatacttaagattc

SEQ ID NO: 1577 - DNA, 19 bp, Severe acute respiratory syndrome coronavirus 2
taatggcatacttaagatt

SEQ ID NO: 1578 - DNA, 19 bp, Severe acute respiratory syndrome coronavirus 2
ctaatggcatacttaagat

SEQ ID NO: 1579 - DNA, 19 bp, Severe acute respiratory syndrome coronavirus 2
actaatggcatacttaaga

SEQ ID NO: 1580 - DNA, 19 bp, Severe acute respiratory syndrome coronavirus 2
cactaatggcatacttaag

SEQ ID NO: 1581 - DNA, 19 bp, Severe acute respiratory syndrome coronavirus 2
gcactaatggcatacttaa

SEQ ID NO: 1582 - DNA, 19 bp, Severe acute respiratory syndrome coronavirus 2
tgcactaatggcatactta

SEQ ID NO: 1583 - DNA, 19 bp, Severe acute respiratory syndrome coronavirus 2
ttgcactaatggcatactt

SEQ ID NO: 1584 - DNA, 19 bp, Severe acute respiratory syndrome coronavirus 2
tttgcactaatggcatact

SEQ ID NO: 1585 - DNA, 19 bp, Severe acute respiratory syndrome coronavirus 2
ctttgcactaatggcatac

SEQ ID NO: 1586 - DNA, 19 bp, Severe acute respiratory syndrome coronavirus 2
tctttgcactaatggcata

SEQ ID NO: 1587 - DNA, 19 bp, Severe acute respiratory syndrome coronavirus 2
ttctttgcactaatggcat

SEQ ID NO: 1588 - DNA, 19 bp, Severe acute respiratory syndrome coronavirus 2
attctttgcactaatggca

SEQ ID NO: 1589 - DNA, 19 bp, Severe acute respiratory syndrome coronavirus 2
tattctttgcactaatggc

SEQ ID NO: 1590 - DNA, 19 bp, Severe acute respiratory syndrome coronavirus 2
ctattctttgcactaatgg

SEQ ID NO: 1591 - DNA, 19 bp, Severe acute respiratory syndrome coronavirus 2
tctattctttgcactaatg

SEQ ID NO: 1592 - DNA, 19 bp, Severe acute respiratory syndrome coronavirus 2
ctctattctttgcactaat

SEQ ID NO: 1593 - DNA, 19 bp, Severe acute respiratory syndrome coronavirus 2
gctctattctttgcactaa

SEQ ID NO: 1594 - DNA, 19 bp, Severe acute respiratory syndrome coronavirus 2
agctctattctttgcacta

SEQ ID NO: 1595 - DNA, 19 bp, Severe acute respiratory syndrome coronavirus 2
gagctctattctttgcact

SEQ ID NO: 1596 - DNA, 19 bp, Severe acute respiratory syndrome coronavirus 2
cgagctctattctttgcac

SEQ ID NO: 1597 - DNA, 19 bp, Severe acute respiratory syndrome coronavirus 2
gcgagctctattctttgca

SEQ ID NO: 1598 - DNA, 19 bp, Severe acute respiratory syndrome coronavirus 2
tgcgagctctattctttgc

SEQ ID NO: 1599 - DNA, 19 bp, Severe acute respiratory syndrome coronavirus 2
gtgcgagctctattctttg

SEQ ID NO: 1600 - DNA, 19 bp, Severe acute respiratory syndrome coronavirus 2
ggtgcgagctctattcttt

SEQ ID NO: 1601 - DNA, 19 bp, Severe acute respiratory syndrome coronavirus 2
cggtgcgagctctattctt

SEQ ID NO: 1602 - DNA, 19 bp, Severe acute respiratory syndrome coronavirus 2
acggtgcgagctctattct

SEQ ID NO: 1603 - DNA, 19 bp, Severe acute respiratory syndrome coronavirus 2
tacggtgcgagctctattc

SEQ ID NO: 1604 - DNA, 19 bp, Severe acute respiratory syndrome coronavirus 2
ctacggtgcgagctctatt

SEQ ID NO: 1605 - DNA, 19 bp, Severe acute respiratory syndrome coronavirus 2
gctacggtgcgagctctat

SEQ ID NO: 1606 - DNA, 19 bp, Severe acute respiratory syndrome coronavirus 2
agctacggtgcgagctcta

SEQ ID NO: 1607 - DNA, 19 bp, Severe acute respiratory syndrome coronavirus 2
cagctacggtgcgagctct

SEQ ID NO: 1608 - DNA, 19 bp, Severe acute respiratory syndrome coronavirus 2
ccagctacggtgcgagctc

SEQ ID NO: 1609 - DNA, 19 bp, Severe acute respiratory syndrome coronavirus 2
accagctacggtgcgagct

SEQ ID NO: 1610 - DNA, 19 bp, Severe acute respiratory syndrome coronavirus 2
caccagctacggtgcgagc

SEQ ID NO: 1611 - DNA, 19 bp, Severe acute respiratory syndrome coronavirus 2
acaccagctacggtgcgag

SEQ ID NO: 1612 - DNA, 19 bp, Severe acute respiratory syndrome coronavirus 2
gacaccagctacggtgcga

SEQ ID NO: 1613 - DNA, 19 bp, Severe acute respiratory syndrome coronavirus 2
agacaccagctacggtgcg

SEQ ID NO: 1614 - DNA, 19 bp, Severe acute respiratory syndrome coronavirus 2
gagacaccagctacggtgc

SEQ ID NO: 1615 - DNA, 19 bp, Severe acute respiratory syndrome coronavirus 2
agagacaccagctacggtg

SEQ ID NO: 1616 - DNA, 19 bp, Severe acute respiratory syndrome coronavirus 2
tagagacaccagctacggt

SEQ ID NO: 1617 - DNA, 19 bp, Severe acute respiratory syndrome coronavirus 2
atagagacaccagctacgg

SEQ ID NO: 1618 - DNA, 19 bp, Severe acute respiratory syndrome coronavirus 2
gatagagacaccagctacg

SEQ ID NO: 1619 - DNA, 19 bp, Severe acute respiratory syndrome coronavirus 2
agatagagacaccagctac

SEQ ID NO: 1620 - DNA, 19 bp, Severe acute respiratory syndrome coronavirus 2
cagatagagacaccagcta

SEQ ID NO: 1621 - DNA, 19 bp, Severe acute respiratory syndrome coronavirus 2
acagatagagacaccagct

SEQ ID NO: 1622 - DNA, 19 bp, Severe acute respiratory syndrome coronavirus 2
tacagatagagacaccagc

SEQ ID NO: 1623 - DNA, 19 bp, Severe acute respiratory syndrome coronavirus 2
ctacagatagagacaccag

SEQ ID NO: 1624 - DNA, 19 bp, Severe acute respiratory syndrome coronavirus 2
actacagatagagacacca

SEQ ID NO: 1625 - DNA, 19 bp, Severe acute respiratory syndrome coronavirus 2
tactacagatagagacacc

SEQ ID NO: 1626 - DNA, 19 bp, Severe acute respiratory syndrome coronavirus 2
gtactacagatagagacac

SEQ ID NO: 1627 - DNA, 19 bp, Severe acute respiratory syndrome coronavirus 2
agtactacagatagagaca

SEQ ID NO: 1628 - DNA, 19 bp, Severe acute respiratory syndrome coronavirus 2
tagtactacagatagagac

SEQ ID NO: 1629 - DNA, 19 bp, Severe acute respiratory syndrome coronavirus 2
atagtactacagatagaga

SEQ ID NO: 1630 - DNA, 19 bp, Severe acute respiratory syndrome coronavirus 2
catagtactacagatagag

SEQ ID NO: 1631 - DNA, 19 bp, Severe acute respiratory syndrome coronavirus 2
tcatagtactacagataga

SEQ ID NO: 1632 - DNA, 19 bp, Severe acute respiratory syndrome coronavirus 2
gtcatagtactacagatag

SEQ ID NO: 1633 - DNA, 19 bp, Severe acute respiratory syndrome coronavirus 2
ctctagtggcggctattga

SEQ ID NO: 1634 - DNA, 19 bp, Severe acute respiratory syndrome coronavirus 2
cctctagtggcggctattg

SEQ ID NO: 1635 - DNA, 19 bp, Severe acute respiratory syndrome coronavirus 2
tcctctagtggcggctatt

SEQ ID NO: 1636 - DNA, 19 bp, Severe acute respiratory syndrome coronavirus 2
ctcctctagtggcggctat

SEQ ID NO: 1637 - DNA, 19 bp, Severe acute respiratory syndrome coronavirus 2
gctcctctagtggcggcta

SEQ ID NO: 1638 - DNA, 19 bp, Severe acute respiratory syndrome coronavirus 2
agctcctctagtggcggct

SEQ ID NO: 1639 - DNA, 19 bp, Severe acute respiratory syndrome coronavirus 2
tagctcctctagtggcggc

SEQ ID NO: 1640 - DNA, 19 bp, Severe acute respiratory syndrome coronavirus 2
gtagctcctctagtggcgg

SEQ ID NO: 1641 - DNA, 19 bp, Severe acute respiratory syndrome coronavirus 2
agtagctcctctagtggcg

SEQ ID NO: 1642 - DNA, 19 bp, Severe acute respiratory syndrome coronavirus 2
cagtagctcctctagtggc

SEQ ID NO: 1643 - DNA, 19 bp, Severe acute respiratory syndrome coronavirus 2
acagtagctcctctagtgg

SEQ ID NO: 1644 - DNA, 19 bp, Severe acute respiratory syndrome coronavirus 2
gcatgttaggcatggctct

SEQ ID NO: 1645 - DNA, 19 bp, Severe acute respiratory syndrome coronavirus 2
agcatgttaggcatggctc

SEQ ID NO: 1646 - DNA, 19 bp, Severe acute respiratory syndrome coronavirus 2
aagcatgttaggcatggct

SEQ ID NO: 1647 - DNA, 19 bp, Severe acute respiratory syndrome coronavirus 2
taagcatgttaggcatggc

SEQ ID NO: 1648 - DNA, 19 bp, Severe acute respiratory syndrome coronavirus 2
ctaagcatgttaggcatgg

SEQ ID NO: 1649 - DNA, 19 bp, Severe acute respiratory syndrome coronavirus 2
gtttgcgagcaagaacaag

SEQ ID NO: 1650 - DNA, 19 bp, Severe acute respiratory syndrome coronavirus 2
tgtttgcgagcaagaacaa

SEQ ID NO: 1651 - DNA, 19 bp, Severe acute respiratory syndrome coronavirus 2
atgtttgcgagcaagaaca

SEQ ID NO: 1652 - DNA, 19 bp, Severe acute respiratory syndrome coronavirus 2
tatgtttgcgagcaagaac

SEQ ID NO: 1653 - DNA, 19 bp, Severe acute respiratory syndrome coronavirus 2
tattagcataagcagttgt

SEQ ID NO: 1654 - DNA, 19 bp, Severe acute respiratory syndrome coronavirus 2
ctattagcataagcagttg

SEQ ID NO: 1655 - DNA, 19 bp, Severe acute respiratory syndrome coronavirus 2
actattagcataagcagtt

SEQ ID NO: 1656 - DNA, 19 bp, Severe acute respiratory syndrome coronavirus 2
cactattagcataagcagt

SEQ ID NO: 1657 - DNA, 19 bp, Severe acute respiratory syndrome coronavirus 2
acactattagcataagcag

SEQ ID NO: 1658 - DNA, 19 bp, Severe acute respiratory syndrome coronavirus 2
ttctatagagacactcata

SEQ ID NO: 1659 - DNA, 19 bp, Severe acute respiratory syndrome coronavirus 2
tttctatagagacactcat

SEQ ID NO: 1660 - DNA, 19 bp, Severe acute respiratory syndrome coronavirus 2
atttctatagagacactca

SEQ ID NO: 1661 - DNA, 19 bp, Severe acute respiratory syndrome coronavirus 2
tatttctatagagacactc

SEQ ID NO: 1662 - DNA, 19 bp, Severe acute respiratory syndrome coronavirus 2
ctatttctatagagacact

SEQ ID NO: 1663 - DNA, 19 bp, Severe acute respiratory syndrome coronavirus 2
taaggtcagtctcagtcca

SEQ ID NO: 1664 - DNA, 19 bp, Severe acute respiratory syndrome coronavirus 2
gtaaggtcagtctcagtcc

SEQ ID NO: 1665 - DNA, 19 bp, Severe acute respiratory syndrome coronavirus 2
agtaaggtcagtctcagtc

SEQ ID NO: 1666 - DNA, 19 bp, Severe acute respiratory syndrome coronavirus 2
tagtaaggtcagtctcagt

SEQ ID NO: 1667 - DNA, 19 bp, Severe acute respiratory syndrome coronavirus 2
ttagtaaggtcagtctcag

SEQ ID NO: 1668 - DNA, 19 bp, Severe acute respiratory syndrome coronavirus 2
tttagtaaggtcagtctca

SEQ ID NO: 1669 - DNA, 19 bp, Severe acute respiratory syndrome coronavirus 2
ctttagtaaggtcagtctc

SEQ ID NO: 1670 - DNA, 19 bp, Severe acute respiratory syndrome coronavirus 2
cctttagtaaggtcagtct

SEQ ID NO: 1671 - DNA, 19 bp, Severe acute respiratory syndrome coronavirus 2
tcctttagtaaggtcagtc

SEQ ID NO: 1672 - DNA, 19 bp, Severe acute respiratory syndrome coronavirus 2
gtcctttagtaaggtcagt

SEQ ID NO: 1673 - DNA, 19 bp, Severe acute respiratory syndrome coronavirus 2
ggtcctttagtaaggtcag

SEQ ID NO: 1674 - DNA, 19 bp, Severe acute respiratory syndrome coronavirus 2
aggtcctttagtaaggtca

SEQ ID NO: 1675 - DNA, 19 bp, Severe acute respiratory syndrome coronavirus 2
gaggtcctttagtaaggtc

SEQ ID NO: 1676 - DNA, 19 bp, Severe acute respiratory syndrome coronavirus 2
tgaggtcctttagtaaggt

SEQ ID NO: 1677 - DNA, 19 bp, Severe acute respiratory syndrome coronavirus 2
gtttaactagcattgtatg

SEQ ID NO: 1678 - DNA, 19 bp, Severe acute respiratory syndrome coronavirus 2
tgtttaactagcattgtat

SEQ ID NO: 1679 - DNA, 19 bp, Severe acute respiratory syndrome coronavirus 2
taagtgtaccatctgtttt

SEQ ID NO: 1680 - DNA, 19 bp, Severe acute respiratory syndrome coronavirus 2
ataagtgtaccatctgttt

SEQ ID NO: 1681 - DNA, 19 bp, Severe acute respiratory syndrome coronavirus 2
cataagtgtaccatctgtt

SEQ ID NO: 1682 - DNA, 19 bp, Severe acute respiratory syndrome coronavirus 2
tcataagtgtaccatctgt

SEQ ID NO: 1683 - DNA, 19 bp, Severe acute respiratory syndrome coronavirus 2
atcataagtgtaccatctg

SEQ ID NO: 1684 - DNA, 19 bp, Severe acute respiratory syndrome coronavirus 2
aatcataagtgtaccatct

SEQ ID NO: 1685 - DNA, 19 bp, Severe acute respiratory syndrome coronavirus 2
caatcataagtgtaccatc

SEQ ID NO: 1686 - DNA, 19 bp, Severe acute respiratory syndrome coronavirus 2
tcaatcataagtgtaccat

SEQ ID NO: 1687 - DNA, 19 bp, Severe acute respiratory syndrome coronavirus 2
cagcatactcctgattagg

SEQ ID NO: 1688 - DNA, 19 bp, Severe acute respiratory syndrome coronavirus 2
tcagcatactcctgattag

SEQ ID NO: 1689 - DNA, 19 bp, Severe acute respiratory syndrome coronavirus 2
atcagcatactcctgatta

SEQ ID NO: 1690 - DNA, 19 bp, Severe acute respiratory syndrome coronavirus 2
catcagcatactcctgatt

SEQ ID NO: 1691 - DNA, 19 bp, Severe acute respiratory syndrome coronavirus 2
acatcagcatactcctgat

SEQ ID NO: 1692 - DNA, 19 bp, Severe acute respiratory syndrome coronavirus 2
cataaaactcaggttccca

SEQ ID NO: 1693 - DNA, 19 bp, Severe acute respiratory syndrome coronavirus 2
tcataaaactcaggttccc

SEQ ID NO: 1694 - DNA, 19 bp, Severe acute respiratory syndrome coronavirus 2
taatagctcatacctccta

SEQ ID NO: 1695 - DNA, 19 bp, Severe acute respiratory syndrome coronavirus 2
tttcaaaggtgtactctcc

SEQ ID NO: 1696 - DNA, 19 bp, Severe acute respiratory syndrome coronavirus 2
ttttcaaaggtgtactctc

SEQ ID NO: 1697 - DNA, 19 bp, Severe acute respiratory syndrome coronavirus 2
tttttcaaaggtgtactct

SEQ ID NO: 1698 - DNA, 19 bp, Severe acute respiratory syndrome coronavirus 2
ctttttcaaaggtgtactc

SEQ ID NO: 1699 - DNA, 19 bp, Severe acute respiratory syndrome coronavirus 2
cctttttcaaaggtgtact

SEQ ID NO: 1700 - DNA, 19 bp, Severe acute respiratory syndrome coronavirus 2
acctttttcaaaggtgtac

SEQ ID NO: 1701 - DNA, 19 bp, Severe acute respiratory syndrome coronavirus 2
cacctttttcaaaggtgta

SEQ ID NO: 1702 - DNA, 19 bp, Severe acute respiratory syndrome coronavirus 2
tcacctttttcaaaggtgt

SEQ ID NO: 1703 - DNA, 19 bp, Severe acute respiratory syndrome coronavirus 2
gtcacctttttcaaaggtg

SEQ ID NO: 1704 - DNA, 19 bp, Severe acute respiratory syndrome coronavirus 2
agtcacctttttcaaaggt

SEQ ID NO: 1705 - DNA, 19 bp, Severe acute respiratory syndrome coronavirus 2
tagtcacctttttcaaagg

SEQ ID NO: 1706 - DNA, 19 bp, Severe acute respiratory syndrome coronavirus 2
atagtcacctttttcaaag

SEQ ID NO: 1707 - DNA, 19 bp, Severe acute respiratory syndrome coronavirus 2
catagtcacctttttcaaa

SEQ ID NO: 1708 - DNA, 19 bp, Severe acute respiratory syndrome coronavirus 2
ccatagtcacctttttcaa

SEQ ID NO: 1709 - DNA, 19 bp, Severe acute respiratory syndrome coronavirus 2
accatagtcacctttttca

SEQ ID NO: 1710 - DNA, 19 bp, Severe acute respiratory syndrome coronavirus 2
caccatagtcacctttttc

SEQ ID NO: 1711 - DNA, 19 bp, Severe acute respiratory syndrome coronavirus 2
tcaccatagtcaccttttt

SEQ ID NO: 1712 - DNA, 19 bp, Severe acute respiratory syndrome coronavirus 2
atcaccatagtcacctttt

SEQ ID NO: 1713 - DNA, 19 bp, Severe acute respiratory syndrome coronavirus 2
catcaccatagtcaccttt

SEQ ID NO: 1714 - DNA, 19 bp, Severe acute respiratory syndrome coronavirus 2
gcatcaccatagtcacctt

SEQ ID NO: 1715 - DNA, 19 bp, Severe acute respiratory syndrome coronavirus 2
agcatcaccatagtcacct

SEQ ID NO: 1716 - DNA, 19 bp, Severe acute respiratory syndrome coronavirus 2
cagcatcaccatagtcacc

SEQ ID NO: 1717 - DNA, 19 bp, Severe acute respiratory syndrome coronavirus 2
acagcatcaccatagtcac

SEQ ID NO: 1718 - DNA, 19 bp, Severe acute respiratory syndrome coronavirus 2
aacagcatcaccatagtca

SEQ ID NO: 1719 - DNA, 19 bp, Severe acute respiratory syndrome coronavirus 2
caacagcatcaccatagtc

SEQ ID NO: 1720 - DNA, 19 bp, Severe acute respiratory syndrome coronavirus 2
acaacagcatcaccatagt

SEQ ID NO: 1721 - DNA, 19 bp, Severe acute respiratory syndrome coronavirus 2
agtgctcttgtggcactag

SEQ ID NO: 1722 - DNA, 19 bp, Severe acute respiratory syndrome coronavirus 2
tagtgctcttgtggcacta

SEQ ID NO: 1723 - DNA, 19 bp, Severe acute respiratory syndrome coronavirus 2
atagtgctcttgtggcact

SEQ ID NO: 1724 - DNA, 19 bp, Severe acute respiratory syndrome coronavirus 2
catagtgctcttgtggcac

SEQ ID NO: 1725 - DNA, 19 bp, Severe acute respiratory syndrome coronavirus 2
acatagtgctcttgtggca

SEQ ID NO: 1726 - DNA, 19 bp, Severe acute respiratory syndrome coronavirus 2
tagaaaactcatctgagat

SEQ ID NO: 1727 - DNA, 19 bp, Severe acute respiratory syndrome coronavirus 2
ctagaaaactcatctgaga

SEQ ID NO: 1728 - DNA, 19 bp, Severe acute respiratory syndrome coronavirus 2
gctagaaaactcatctgag

SEQ ID NO: 1729 - DNA, 19 bp, Severe acute respiratory syndrome coronavirus 2
tgctagaaaactcatctga

SEQ ID NO: 1730 - DNA, 19 bp, Severe acute respiratory syndrome coronavirus 2
ttgctagaaaactcatctg

SEQ ID NO: 1731 - DNA, 19 bp, Severe acute respiratory syndrome coronavirus 2
attgctagaaaactcatct

SEQ ID NO: 1732 - DNA, 19 bp, Severe acute respiratory syndrome coronavirus 2
cattgctagaaaactcatc

SEQ ID NO: 1733 - DNA, 19 bp, Severe acute respiratory syndrome coronavirus 2
acattgctagaaaactcat

SEQ ID NO: 1734 - DNA, 19 bp, Severe acute respiratory syndrome coronavirus 2
aacattgctagaaaactca

SEQ ID NO: 1735 - DNA, 19 bp, Severe acute respiratory syndrome coronavirus 2
caacattgctagaaaactc

SEQ ID NO: 1736 - DNA, 19 bp, Severe acute respiratory syndrome coronavirus 2
gcaacattgctagaaaact

SEQ ID NO: 1737 - DNA, 19 bp, Severe acute respiratory syndrome coronavirus 2
tgcaacattgctagaaaac

SEQ ID NO: 1738 - DNA, 19 bp, Severe acute respiratory syndrome coronavirus 2
ttgcaacattgctagaaaa

SEQ ID NO: 1739 - DNA, 19 bp, Severe acute respiratory syndrome coronavirus 2
tttgcaacattgctagaaa

SEQ ID NO: 1740 - DNA, 19 bp, Severe acute respiratory syndrome coronavirus 2
atttgcaacattgctagaa

SEQ ID NO: 1741 - DNA, 19 bp, Severe acute respiratory syndrome coronavirus 2
aatttgcaacattgctaga

SEQ ID NO: 1742 - DNA, 19 bp, Severe acute respiratory syndrome coronavirus 2
taatttgcaacattgctag

SEQ ID NO: 1743 - DNA, 19 bp, Severe acute respiratory syndrome coronavirus 2
taccagtaccaggtggtcc

SEQ ID NO: 1744 - DNA, 19 bp, Severe acute respiratory syndrome coronavirus 2
ttaccagtaccaggtggtc

SEQ ID NO: 1745 - DNA, 19 bp, Severe acute respiratory syndrome coronavirus 2
cttaccagtaccaggtggt

SEQ ID NO: 1746 - DNA, 19 bp, Severe acute respiratory syndrome coronavirus 2
tcttaccagtaccaggtgg

SEQ ID NO: 1747 - DNA, 19 bp, Severe acute respiratory syndrome coronavirus 2
ctcttaccagtaccaggtg

SEQ ID NO: 1748 - DNA, 19 bp, Severe acute respiratory syndrome coronavirus 2
actcttaccagtaccaggt

SEQ ID NO: 1749 - DNA, 19 bp, Severe acute respiratory syndrome coronavirus 2
gactcttaccagtaccagg

SEQ ID NO: 1750 - DNA, 19 bp, Severe acute respiratory syndrome coronavirus 2
tgactcttaccagtaccag

SEQ ID NO: 1751 - DNA, 19 bp, Severe acute respiratory syndrome coronavirus 2
atgactcttaccagtacca

SEQ ID NO: 1752 - DNA, 19 bp, Severe acute respiratory syndrome coronavirus 2
aatgactcttaccagtacc

SEQ ID NO: 1753 - DNA, 19 bp, Severe acute respiratory syndrome coronavirus 2
aaatgactcttaccagtac

SEQ ID NO: 1754 - DNA, 19 bp, Severe acute respiratory syndrome coronavirus 2
aaaatgactcttaccagta

SEQ ID NO: 1755 - DNA, 19 bp, Severe acute respiratory syndrome coronavirus 2
caaaatgactcttaccagt

SEQ ID NO: 1756 - DNA, 19 bp, Severe acute respiratory syndrome coronavirus 2
gcaaaatgactcttaccag

SEQ ID NO: 1757 - DNA, 19 bp, Severe acute respiratory syndrome coronavirus 2
tatacactatgcgagcaga

SEQ ID NO: 1758 - DNA, 19 bp, Severe acute respiratory syndrome coronavirus 2
gtatacactatgcgagcag

SEQ ID NO: 1759 - DNA, 19 bp, Severe acute respiratory syndrome coronavirus 2
ttgaattcactttgaattt

SEQ ID NO: 1760 - DNA, 19 bp, Severe acute respiratory syndrome coronavirus 2
gttgaattcactttgaatt

SEQ ID NO: 1761 - DNA, 19 bp, Severe acute respiratory syndrome coronavirus 2
tgttgaattcactttgaat

SEQ ID NO: 1762 - DNA, 19 bp, Severe acute respiratory syndrome coronavirus 2
ggaacatgtctggacctat

SEQ ID NO: 1763 - DNA, 19 bp, Severe acute respiratory syndrome coronavirus 2
aggaacatgtctggaccta

SEQ ID NO: 1764 - DNA, 19 bp, Severe acute respiratory syndrome coronavirus 2
caatttcagcaggacaacg

SEQ ID NO: 1765 - DNA, 19 bp, Severe acute respiratory syndrome coronavirus 2
acaatttcagcaggacaac

SEQ ID NO: 1766 - DNA, 19 bp, Severe acute respiratory syndrome coronavirus 2
ttgcagatgaaacatcatg

SEQ ID NO: 1767 - DNA, 19 bp, Severe acute respiratory syndrome coronavirus 2
attgcagatgaaacatcat

SEQ ID NO: 1768 - DNA, 19 bp, Severe acute respiratory syndrome coronavirus 2
cagcttttctccaagcagg

SEQ ID NO: 1769 - DNA, 19 bp, Severe acute respiratory syndrome coronavirus 2
acagcttttctccaagcag

SEQ ID NO: 1770 - DNA, 19 bp, Severe acute respiratory syndrome coronavirus 2
tgaatatgacatagtcata

SEQ ID NO: 1771 - DNA, 19 bp, Severe acute respiratory syndrome coronavirus 2
gtgaatatgacatagtcat

SEQ ID NO: 1772 - DNA, 19 bp, Severe acute respiratory syndrome coronavirus 2
ctctatcagacattatgca

SEQ ID NO: 1773 - DNA, 19 bp, Severe acute respiratory syndrome coronavirus 2
tctctatcagacattatgc

SEQ ID NO: 1774 - DNA, 19 bp, Severe acute respiratory syndrome coronavirus 2
ggtgtgtaggtgcctgtgt

SEQ ID NO: 1775 - DNA, 19 bp, Severe acute respiratory syndrome coronavirus 2
aggtgtgtaggtgcctgtg

SEQ ID NO: 1776 - DNA, 19 bp, Severe acute respiratory syndrome coronavirus 2
gaggtgtgtaggtgcctgt

SEQ ID NO: 1777 - DNA, 19 bp, Severe acute respiratory syndrome coronavirus 2
tgaggtgtgtaggtgcctg

SEQ ID NO: 1778 - DNA, 19 bp, Severe acute respiratory syndrome coronavirus 2
ctgaggtgtgtaggtgcct

SEQ ID NO: 1779 - DNA, 19 bp, Severe acute respiratory syndrome coronavirus 2
ccatcatagagatgagtct

SEQ ID NO: 1780 - DNA, 19 bp, Severe acute respiratory syndrome coronavirus 2
cccatcatagagatgagtc

SEQ ID NO: 1781 - DNA, 19 bp, Severe acute respiratory syndrome coronavirus 2
acccatcatagagatgagt

SEQ ID NO: 1782 - DNA, 19 bp, Severe acute respiratory syndrome coronavirus 2
aacccatcatagagatgag

SEQ ID NO: 1783 - DNA, 19 bp, Severe acute respiratory syndrome coronavirus 2
aaacccatcatagagatga

SEQ ID NO: 1784 - DNA, 19 bp, Severe acute respiratory syndrome coronavirus 2
ccacattttctaaactctg

SEQ ID NO: 1785 - DNA, 19 bp, Severe acute respiratory syndrome coronavirus 2
gccacattttctaaactct

SEQ ID NO: 1786 - DNA, 19 bp, Severe acute respiratory syndrome coronavirus 2
agccacattttctaaactc

SEQ ID NO: 1787 - DNA, 19 bp, Severe acute respiratory syndrome coronavirus 2
aagccacattttctaaact

SEQ ID NO: 1788 - DNA, 19 bp, Severe acute respiratory syndrome coronavirus 2
gcttagcccaaagctcaaa

SEQ ID NO: 1789 - DNA, 19 bp, Severe acute respiratory syndrome coronavirus 2
cgcttagcccaaagctcaa

SEQ ID NO: 1790 - DNA, 19 bp, Severe acute respiratory syndrome coronavirus 2
cacccaaattattgagtat

SEQ ID NO: 1791 - DNA, 19 bp, Severe acute respiratory syndrome coronavirus 2
acacccaaattattgagta

SEQ ID NO: 1792 - DNA, 19 bp, Severe acute respiratory syndrome coronavirus 2
caattaatgtgactccatt

SEQ ID NO: 1793 - DNA, 19 bp, Severe acute respiratory syndrome coronavirus 2
ccaattaatgtgactccat

SEQ ID NO: 1794 - DNA, 19 bp, Severe acute respiratory syndrome coronavirus 2
tccaattaatgtgactcca

SEQ ID NO: 1795 - DNA, 19 bp, Severe acute respiratory syndrome coronavirus 2
ctccaattaatgtgactcc

SEQ ID NO: 1796 - DNA, 19 bp, Severe acute respiratory syndrome coronavirus 2
tctccaattaatgtgactc

SEQ ID NO: 1797 - DNA, 19 bp, Severe acute respiratory syndrome coronavirus 2
ttctccaattaatgtgact

SEQ ID NO: 1798 - DNA, 19 bp, Severe acute respiratory syndrome coronavirus 2
ttgcgacattcatcattat

SEQ ID NO: 1799 - DNA, 19 bp, Severe acute respiratory syndrome coronavirus 2
tttgcgacattcatcatta

SEQ ID NO: 1800 - DNA, 19 bp, Severe acute respiratory syndrome coronavirus 2
ctctgttgttttctctaat

SEQ ID NO: 1801 - DNA, 19 bp, Severe acute respiratory syndrome coronavirus 2
actctgttgttttctctaa

SEQ ID NO: 1802 - DNA, 19 bp, Severe acute respiratory syndrome coronavirus 2
aactctgttgttttctcta

SEQ ID NO: 1803 - DNA, 19 bp, Severe acute respiratory syndrome coronavirus 2
caactctgttgttttctct

SEQ ID NO: 1804 - DNA, 19 bp, Severe acute respiratory syndrome coronavirus 2
acaactctgttgttttctc

SEQ ID NO: 1805 - DNA, 19 bp, Severe acute respiratory syndrome coronavirus 2
ggttctcatagagaacatt

SEQ ID NO: 1806 - DNA, 19 bp, Severe acute respiratory syndrome coronavirus 2
tggttctcatagagaacat

SEQ ID NO: 1807 - DNA, 19 bp, Severe acute respiratory syndrome coronavirus 2
ttggttctcatagagaaca

SEQ ID NO: 1808 - DNA, 19 bp, Severe acute respiratory syndrome coronavirus 2
tttggttctcatagagaac

SEQ ID NO: 1809 - DNA, 19 bp, Severe acute respiratory syndrome coronavirus 2
ttttggttctcatagagaa

SEQ ID NO: 1810 - DNA, 19 bp, Severe acute respiratory syndrome coronavirus 2
tttttggttctcatagaga

SEQ ID NO: 1811 - DNA, 19 bp, Severe acute respiratory syndrome coronavirus 2
agctaagttgtttaacaag

SEQ ID NO: 1812 - DNA, 19 bp, Severe acute respiratory syndrome coronavirus 2
gagctaagttgtttaacaa

SEQ ID NO: 1813 - DNA, 19 bp, Severe acute respiratory syndrome coronavirus 2
cagcaagattagcagaagc

SEQ ID NO: 1814 - DNA, 19 bp, Severe acute respiratory syndrome coronavirus 2
gcagcaagattagcagaag

SEQ ID NO: 1815 - DNA, 19 bp, Severe acute respiratory syndrome coronavirus 2
agcagcaagattagcagaa

SEQ ID NO: 1816 - DNA, 19 bp, Severe acute respiratory syndrome coronavirus 2
tagcagcaagattagcaga

SEQ ID NO: 1817 - DNA, 19 bp, Severe acute respiratory syndrome coronavirus 2
gtagcagcaagattagcag

SEQ ID NO: 1818 - DNA, 19 bp, Severe acute respiratory syndrome coronavirus 2
agtagcagcaagattagca

SEQ ID NO: 1819 - DNA, 19 bp, Severe acute respiratory syndrome coronavirus 2
tagtagcagcaagattagc

SEQ ID NO: 1820 - DNA, 19 bp, Severe acute respiratory syndrome coronavirus 2
ttagtagcagcaagattag

SEQ ID NO: 1821 - DNA, 19 bp, Severe acute respiratory syndrome coronavirus 2
tttagtagcagcaagatta

SEQ ID NO: 1822 - DNA, 19 bp, Severe acute respiratory syndrome coronavirus 2
ttttagtagcagcaagatt

SEQ ID NO: 1823 - DNA, 19 bp, Severe acute respiratory syndrome coronavirus 2
attttagtagcagcaagat

SEQ ID NO: 1824 - DNA, 19 bp, Severe acute respiratory syndrome coronavirus 2
cattttagtagcagcaaga

SEQ ID NO: 1825 - DNA, 19 bp, Severe acute respiratory syndrome coronavirus 2
acattttagtagcagcaag

SEQ ID NO: 1826 - DNA, 19 bp, Severe acute respiratory syndrome coronavirus 2
gacattttagtagcagcaa

SEQ ID NO: 1827 - DNA, 19 bp, Severe acute respiratory syndrome coronavirus 2
ctctttttgattgtccaag

SEQ ID NO: 1828 - DNA, 19 bp, Severe acute respiratory syndrome coronavirus 2
actctttttgattgtccaa

SEQ ID NO: 1829 - DNA, 19 bp, Severe acute respiratory syndrome coronavirus 2
aactctttttgattgtcca

SEQ ID NO: 1830 - DNA, 19 bp, Severe acute respiratory syndrome coronavirus 2
caactctttttgattgtcc

SEQ ID NO: 1831 - DNA, 19 bp, Severe acute respiratory syndrome coronavirus 2
tcaactctttttgattgtc

SEQ ID NO: 1832 - DNA, 19 bp, Severe acute respiratory syndrome coronavirus 2
catctggtgatgtatgatt

SEQ ID NO: 1833 - DNA, 19 bp, Severe acute respiratory syndrome coronavirus 2
acatctggtgatgtatgat

SEQ ID NO: 1834 - DNA, 19 bp, Severe acute respiratory syndrome coronavirus 2
aacatctggtgatgtatga

SEQ ID NO: 1835 - DNA, 19 bp, Severe acute respiratory syndrome coronavirus 2
caacatctggtgatgtatg

SEQ ID NO: 1836 - DNA, 19 bp, Severe acute respiratory syndrome coronavirus 2
tcaacatctggtgatgtat

SEQ ID NO: 1837 - DNA, 19 bp, Severe acute respiratory syndrome coronavirus 2
atcaacatctggtgatgta

SEQ ID NO: 1838 - DNA, 19 bp, Severe acute respiratory syndrome coronavirus 2
ttgaggcggtcaatttctt

SEQ ID NO: 1839 - DNA, 19 bp, Severe acute respiratory syndrome coronavirus 2
attgaggcggtcaatttct

SEQ ID NO: 1840 - DNA, 19 bp, Severe acute respiratory syndrome coronavirus 2
cattgaggcggtcaatttc

SEQ ID NO: 1841 - DNA, 19 bp, Severe acute respiratory syndrome coronavirus 2
tcattgaggcggtcaattt

SEQ ID NO: 1842 - DNA, 19 bp, Severe acute respiratory syndrome coronavirus 2
ctcattgaggcggtcaatt

SEQ ID NO: 1843 - DNA, 19 bp, Severe acute respiratory syndrome coronavirus 2
cctcattgaggcggtcaat

SEQ ID NO: 1844 - DNA, 19 bp, Severe acute respiratory syndrome coronavirus 2
acctcattgaggcggtcaa

SEQ ID NO: 1845 - DNA, 19 bp, Severe acute respiratory syndrome coronavirus 2
atgtgtaatgtaatttgac

SEQ ID NO: 1846 - DNA, 19 bp, Severe acute respiratory syndrome coronavirus 2
tatgtgtaatgtaatttga

SEQ ID NO: 1847 - DNA, 19 bp, Severe acute respiratory syndrome coronavirus 2
ttatgtgtaatgtaatttg

SEQ ID NO: 1848 - DNA, 19 bp, Severe acute respiratory syndrome coronavirus 2
tttatgtgtaatgtaattt

SEQ ID NO: 1849 - DNA, 19 bp, Severe acute respiratory syndrome coronavirus 2
gtttatgtgtaatgtaatt

SEQ ID NO: 1850 - DNA, 19 bp, Severe acute respiratory syndrome coronavirus 2
cgtttatgtgtaatgtaat

SEQ ID NO: 1851 - DNA, 19 bp, Severe acute respiratory syndrome coronavirus 2
aaagggagtgaggcttgta

SEQ ID NO: 1852 - DNA, 19 bp, Severe acute respiratory syndrome coronavirus 2
gaaagggagtgaggcttgt

SEQ ID NO: 1853 - DNA, 19 bp, Severe acute respiratory syndrome coronavirus 2
cgaaagggagtgaggcttg

SEQ ID NO: 1854 - DNA, 19 bp, Severe acute respiratory syndrome coronavirus 2
ccgaaagggagtgaggctt

SEQ ID NO: 1855 - DNA, 19 bp, Severe acute respiratory syndrome coronavirus 2
tccgaaagggagtgaggct

SEQ ID NO: 1856 - DNA, 19 bp, Severe acute respiratory syndrome coronavirus 2
atccgaaagggagtgaggc

SEQ ID NO: 1857 - DNA, 19 bp, Severe acute respiratory syndrome coronavirus 2
catccgaaagggagtgagg

SEQ ID NO: 1858 - DNA, 19 bp, Severe acute respiratory syndrome coronavirus 2
ccatccgaaagggagtgag

SEQ ID NO: 1859 - DNA, 19 bp, Severe acute respiratory syndrome coronavirus 2
gccatccgaaagggagtga

SEQ ID NO: 1860 - DNA, 19 bp, Severe acute respiratory syndrome coronavirus 2
agccatccgaaagggagtg

SEQ ID NO: 1861 - DNA, 19 bp, Severe acute respiratory syndrome coronavirus 2
aagccatccgaaagggagt

SEQ ID NO: 1862 - DNA, 19 bp, Severe acute respiratory syndrome coronavirus 2
cgctagtagtcgtcgtcgg

SEQ ID NO: 1863 - DNA, 19 bp, Severe acute respiratory syndrome coronavirus 2
acgctagtagtcgtcgtcg

SEQ ID NO: 1864 - DNA, 19 bp, Severe acute respiratory syndrome coronavirus 2
cacgctagtagtcgtcgtc

SEQ ID NO: 1865 - DNA, 19 bp, Severe acute respiratory syndrome coronavirus 2
gcacgctagtagtcgtcgt

SEQ ID NO: 1866 - DNA, 19 bp, Severe acute respiratory syndrome coronavirus 2
ggcacgctagtagtcgtcg

SEQ ID NO: 1867 - DNA, 19 bp, Severe acute respiratory syndrome coronavirus 2
aggcacgctagtagtcgtc

SEQ ID NO: 1868 - DNA, 19 bp, Severe acute respiratory syndrome coronavirus 2
aaggcacgctagtagtcgt

SEQ ID NO: 1869 - DNA, 19 bp, Severe acute respiratory syndrome coronavirus 2
aaaggcacgctagtagtcg

SEQ ID NO: 1870 - DNA, 19 bp, Severe acute respiratory syndrome coronavirus 2
caaaggcacgctagtagtc

SEQ ID NO: 1871 - DNA, 19 bp, Severe acute respiratory syndrome coronavirus 2
acaaaggcacgctagtagt

SEQ ID NO: 1872 - DNA, 19 bp, Severe acute respiratory syndrome coronavirus 2
tacaaaggcacgctagtag

SEQ ID NO: 1873 - DNA, 19 bp, Severe acute respiratory syndrome coronavirus 2
ttacaaaggcacgctagta

SEQ ID NO: 1874 - DNA, 19 bp, Severe acute respiratory syndrome coronavirus 2
cttacaaaggcacgctagt

SEQ ID NO: 1875 - DNA, 19 bp, Severe acute respiratory syndrome coronavirus 2
gcttacaaaggcacgctag

SEQ ID NO: 1876 - DNA, 19 bp, Severe acute respiratory syndrome coronavirus 2
tgcttacaaaggcacgcta

SEQ ID NO: 1877 - DNA, 19 bp, Severe acute respiratory syndrome coronavirus 2
gtgcttacaaaggcacgct

SEQ ID NO: 1878 - DNA, 19 bp, Severe acute respiratory syndrome coronavirus 2
tgtgcttacaaaggcacgc

SEQ ID NO: 1879 - DNA, 19 bp, Severe acute respiratory syndrome coronavirus 2
ttgtgcttacaaaggcacg

SEQ ID NO: 1880 - DNA, 19 bp, Severe acute respiratory syndrome coronavirus 2
cttgtgcttacaaaggcac

SEQ ID NO: 1881 - DNA, 19 bp, Severe acute respiratory syndrome coronavirus 2
gtacataagttcgtactca

SEQ ID NO: 1882 - DNA, 19 bp, Severe acute respiratory syndrome coronavirus 2
agtacataagttcgtactc

SEQ ID NO: 1883 - DNA, 19 bp, Severe acute respiratory syndrome coronavirus 2
gagtacataagttcgtact

SEQ ID NO: 1884 - DNA, 19 bp, Severe acute respiratory syndrome coronavirus 2
tgagtacataagttcgtac

SEQ ID NO: 1885 - DNA, 19 bp, Severe acute respiratory syndrome coronavirus 2
atgagtacataagttcgta

SEQ ID NO: 1886 - DNA, 19 bp, Severe acute respiratory syndrome coronavirus 2
aatgagtacataagttcgt

SEQ ID NO: 1887 - DNA, 19 bp, Severe acute respiratory syndrome coronavirus 2
gaatgagtacataagttcg

SEQ ID NO: 1888 - DNA, 19 bp, Severe acute respiratory syndrome coronavirus 2
cgaatgagtacataagttc

SEQ ID NO: 1889 - DNA, 19 bp, Severe acute respiratory syndrome coronavirus 2
acgaatgagtacataagtt

SEQ ID NO: 1890 - DNA, 19 bp, Severe acute respiratory syndrome coronavirus 2
aacgaatgagtacataagt

SEQ ID NO: 1891 - DNA, 19 bp, Severe acute respiratory syndrome coronavirus 2
aaacgaatgagtacataag

SEQ ID NO: 1892 - DNA, 19 bp, Severe acute respiratory syndrome coronavirus 2
gaaacgaatgagtacataa

SEQ ID NO: 1893 - DNA, 19 bp, Severe acute respiratory syndrome coronavirus 2
cgaaacgaatgagtacata

SEQ ID NO: 1894 - DNA, 19 bp, Severe acute respiratory syndrome coronavirus 2
ccgaaacgaatgagtacat

SEQ ID NO: 1895 - DNA, 19 bp, Severe acute respiratory syndrome coronavirus 2
tccgaaacgaatgagtaca

SEQ ID NO: 1896 - DNA, 19 bp, Severe acute respiratory syndrome coronavirus 2
ttccgaaacgaatgagtac

SEQ ID NO: 1897 - DNA, 19 bp, Severe acute respiratory syndrome coronavirus 2
cttccgaaacgaatgagta

SEQ ID NO: 1898 - DNA, 19 bp, Severe acute respiratory syndrome coronavirus 2
tcttccgaaacgaatgagt

SEQ ID NO: 1899 - DNA, 19 bp, Severe acute respiratory syndrome coronavirus 2
taactattaacgtacctgt

SEQ ID NO: 1900 - DNA, 19 bp, Severe acute respiratory syndrome coronavirus 2
ttaactattaacgtacctg

SEQ ID NO: 1901 - DNA, 19 bp, Severe acute respiratory syndrome coronavirus 2
attaactattaacgtacct

SEQ ID NO: 1902 - DNA, 19 bp, Severe acute respiratory syndrome coronavirus 2
tattaactattaacgtacc

SEQ ID NO: 1903 - DNA, 19 bp, Severe acute respiratory syndrome coronavirus 2
ctattaactattaacgtac

SEQ ID NO: 1904 - DNA, 19 bp, Severe acute respiratory syndrome coronavirus 2
gctattaactattaacgta

SEQ ID NO: 1905 - DNA, 19 bp, Severe acute respiratory syndrome coronavirus 2
cgctattaactattaacgt

SEQ ID NO: 1906 - DNA, 19 bp, Severe acute respiratory syndrome coronavirus 2
acgctattaactattaacg

SEQ ID NO: 1907 - DNA, 19 bp, Severe acute respiratory syndrome coronavirus 2
tacgctattaactattaac

SEQ ID NO: 1908 - DNA, 19 bp, Severe acute respiratory syndrome coronavirus 2
gtacgctattaactattaa

SEQ ID NO: 1909 - DNA, 19 bp, Severe acute respiratory syndrome coronavirus 2
agtacgctattaactatta

SEQ ID NO: 1910 - DNA, 19 bp, Severe acute respiratory syndrome coronavirus 2
aagtacgctattaactatt

SEQ ID NO: 1911 - DNA, 19 bp, Severe acute respiratory syndrome coronavirus 2
gaagtacgctattaactat

SEQ ID NO: 1912 - DNA, 19 bp, Severe acute respiratory syndrome coronavirus 2
agaagtacgctattaacta

SEQ ID NO: 1913 - DNA, 19 bp, Severe acute respiratory syndrome coronavirus 2
aagaagtacgctattaact

SEQ ID NO: 1914 - DNA, 19 bp, Severe acute respiratory syndrome coronavirus 2
aaagaagtacgctattaac

SEQ ID NO: 1915 - DNA, 19 bp, Severe acute respiratory syndrome coronavirus 2
aaaagaagtacgctattaa

SEQ ID NO: 1916 - DNA, 19 bp, Severe acute respiratory syndrome coronavirus 2
aaaaagaagtacgctatta

SEQ ID NO: 1917 - DNA, 19 bp, Severe acute respiratory syndrome coronavirus 2
gaaaaagaagtacgctatt

SEQ ID NO: 1918 - DNA, 19 bp, Severe acute respiratory syndrome coronavirus 2
agaaaaagaagtacgctat

SEQ ID NO: 1919 - DNA, 19 bp, Severe acute respiratory syndrome coronavirus 2
aagaaaaagaagtacgcta

SEQ ID NO: 1920 - DNA, 19 bp, Severe acute respiratory syndrome coronavirus 2
caagaaaaagaagtacgct

SEQ ID NO: 1921 - DNA, 19 bp, Severe acute respiratory syndrome coronavirus 2
gcaagaaaaagaagtacgc

SEQ ID NO: 1922 - DNA, 19 bp, Severe acute respiratory syndrome coronavirus 2
agcaagaaaaagaagtacg

SEQ ID NO: 1923 - DNA, 19 bp, Severe acute respiratory syndrome coronavirus 2
aagcaagaaaaagaagtac

SEQ ID NO: 1924 - DNA, 19 bp, Severe acute respiratory syndrome coronavirus 2
aaagcaagaaaaagaagta

SEQ ID NO: 1925 - DNA, 19 bp, Severe acute respiratory syndrome coronavirus 2
gaaagcaagaaaaagaagt

SEQ ID NO: 1926 - DNA, 19 bp, Severe acute respiratory syndrome coronavirus 2
cgaaagcaagaaaaagaag

SEQ ID NO: 1927 - DNA, 19 bp, Severe acute respiratory syndrome coronavirus 2
acgaaagcaagaaaaagaa

SEQ ID NO: 1928 - DNA, 19 bp, Severe acute respiratory syndrome coronavirus 2
cacgaaagcaagaaaaaga

SEQ ID NO: 1929 - DNA, 19 bp, Severe acute respiratory syndrome coronavirus 2
ccacgaaagcaagaaaaag

SEQ ID NO: 1930 - DNA, 19 bp, Severe acute respiratory syndrome coronavirus 2
accacgaaagcaagaaaaa

SEQ ID NO: 1931 - DNA, 19 bp, Severe acute respiratory syndrome coronavirus 2
taccacgaaagcaagaaaa

SEQ ID NO: 1932 - DNA, 19 bp, Severe acute respiratory syndrome coronavirus 2
ataccacgaaagcaagaaa

SEQ ID NO: 1933 - DNA, 19 bp, Severe acute respiratory syndrome coronavirus 2
aataccacgaaagcaagaa

SEQ ID NO: 1934 - DNA, 19 bp, Severe acute respiratory syndrome coronavirus 2
gaataccacgaaagcaaga

SEQ ID NO: 1935 - DNA, 19 bp, Severe acute respiratory syndrome coronavirus 2
agaataccacgaaagcaag

SEQ ID NO: 1936 - DNA, 19 bp, Severe acute respiratory syndrome coronavirus 2
aagaataccacgaaagcaa

SEQ ID NO: 1937 - DNA, 19 bp, Severe acute respiratory syndrome coronavirus 2
caagaataccacgaaagca

SEQ ID NO: 1938 - DNA, 19 bp, Severe acute respiratory syndrome coronavirus 2
gcaagaataccacgaaagc

SEQ ID NO: 1939 - DNA, 19 bp, Severe acute respiratory syndrome coronavirus 2
agcaagaataccacgaaag

SEQ ID NO: 1940 - DNA, 19 bp, Severe acute respiratory syndrome coronavirus 2
tagcaagaataccacgaaa

SEQ ID NO: 1941 - DNA, 19 bp, Severe acute respiratory syndrome coronavirus 2
ctagcaagaataccacgaa

SEQ ID NO: 1942 - DNA, 19 bp, Severe acute respiratory syndrome coronavirus 2
actagcaagaataccacga

SEQ ID NO: 1943 - DNA, 19 bp, Severe acute respiratory syndrome coronavirus 2
cagtaaggatggctagtgt

SEQ ID NO: 1944 - DNA, 19 bp, Severe acute respiratory syndrome coronavirus 2
gcagtaaggatggctagtg

SEQ ID NO: 1945 - DNA, 19 bp, Severe acute respiratory syndrome coronavirus 2
cgcagtaaggatggctagt

SEQ ID NO: 1946 - DNA, 19 bp, Severe acute respiratory syndrome coronavirus 2
gcgcagtaaggatggctag

SEQ ID NO: 1947 - DNA, 19 bp, Severe acute respiratory syndrome coronavirus 2
agcgcagtaaggatggcta

SEQ ID NO: 1948 - DNA, 19 bp, Severe acute respiratory syndrome coronavirus 2
aagcgcagtaaggatggct

SEQ ID NO: 1949 - DNA, 19 bp, Severe acute respiratory syndrome coronavirus 2
gaagcgcagtaaggatggc

SEQ ID NO: 1950 - DNA, 19 bp, Severe acute respiratory syndrome coronavirus 2
cgaagcgcagtaaggatgg

SEQ ID NO: 1951 - DNA, 19 bp, Severe acute respiratory syndrome coronavirus 2
tcgaagcgcagtaaggatg

SEQ ID NO: 1952 - DNA, 19 bp, Severe acute respiratory syndrome coronavirus 2
atcgaagcgcagtaaggat

SEQ ID NO: 1953 - DNA, 19 bp, Severe acute respiratory syndrome coronavirus 2
aatcgaagcgcagtaagga

SEQ ID NO: 1954 - DNA, 19 bp, Severe acute respiratory syndrome coronavirus 2
caatcgaagcgcagtaagg

SEQ ID NO: 1955 - DNA, 19 bp, Severe acute respiratory syndrome coronavirus 2
acaatcgaagcgcagtaag

SEQ ID NO: 1956 - DNA, 19 bp, Severe acute respiratory syndrome coronavirus 2
cacaatcgaagcgcagtaa

SEQ ID NO: 1957 - DNA, 19 bp, Severe acute respiratory syndrome coronavirus 2
acacaatcgaagcgcagta

SEQ ID NO: 1958 - DNA, 19 bp, Severe acute respiratory syndrome coronavirus 2
cacacaatcgaagcgcagt

SEQ ID NO: 1959 - DNA, 19 bp, Severe acute respiratory syndrome coronavirus 2
gcacacaatcgaagcgcag

SEQ ID NO: 1960 - DNA, 19 bp, Severe acute respiratory syndrome coronavirus 2
cgcacacaatcgaagcgca

SEQ ID NO: 1961 - DNA, 19 bp, Severe acute respiratory syndrome coronavirus 2
acgcacacaatcgaagcgc

SEQ ID NO: 1962 - DNA, 19 bp, Severe acute respiratory syndrome coronavirus 2
tacgcacacaatcgaagcg

SEQ ID NO: 1963 - DNA, 19 bp, Severe acute respiratory syndrome coronavirus 2
gtacgcacacaatcgaagc

SEQ ID NO: 1964 - DNA, 19 bp, Severe acute respiratory syndrome coronavirus 2
agtacgcacacaatcgaag

SEQ ID NO: 1965 - DNA, 19 bp, Severe acute respiratory syndrome coronavirus 2
cagtacgcacacaatcgaa

SEQ ID NO: 1966 - DNA, 19 bp, Severe acute respiratory syndrome coronavirus 2
gcagtacgcacacaatcga

SEQ ID NO: 1967 - DNA, 19 bp, Severe acute respiratory syndrome coronavirus 2
agcagtacgcacacaatcg

SEQ ID NO: 1968 - DNA, 19 bp, Severe acute respiratory syndrome coronavirus 2
cagcagtacgcacacaatc

SEQ ID NO: 1969 - DNA, 19 bp, Severe acute respiratory syndrome coronavirus 2
gcagcagtacgcacacaat

SEQ ID NO: 1970 - DNA, 19 bp, Severe acute respiratory syndrome coronavirus 2
tgcagcagtacgcacacaa

SEQ ID NO: 1971 - DNA, 19 bp, Severe acute respiratory syndrome coronavirus 2
ttgcagcagtacgcacaca

SEQ ID NO: 1972 - DNA, 19 bp, Severe acute respiratory syndrome coronavirus 2
attgcagcagtacgcacac

SEQ ID NO: 1973 - DNA, 19 bp, Severe acute respiratory syndrome coronavirus 2
tattgcagcagtacgcaca

SEQ ID NO: 1974 - DNA, 19 bp, Severe acute respiratory syndrome coronavirus 2
atattgcagcagtacgcac

SEQ ID NO: 1975 - DNA, 19 bp, Severe acute respiratory syndrome coronavirus 2
aatattgcagcagtacgca

SEQ ID NO: 1976 - DNA, 19 bp, Severe acute respiratory syndrome coronavirus 2
caatattgcagcagtacgc

SEQ ID NO: 1977 - DNA, 19 bp, Severe acute respiratory syndrome coronavirus 2
acaatattgcagcagtacg

SEQ ID NO: 1978 - DNA, 19 bp, Severe acute respiratory syndrome coronavirus 2
aacaatattgcagcagtac

SEQ ID NO: 1979 - DNA, 19 bp, Severe acute respiratory syndrome coronavirus 2
taacaatattgcagcagta

SEQ ID NO: 1980 - DNA, 19 bp, Severe acute respiratory syndrome coronavirus 2
ttaacaatattgcagcagt

SEQ ID NO: 1981 - DNA, 19 bp, Severe acute respiratory syndrome coronavirus 2
gttaacaatattgcagcag

SEQ ID NO: 1982 - DNA, 19 bp, Severe acute respiratory syndrome coronavirus 2
cgttaacaatattgcagca

SEQ ID NO: 1983 - DNA, 19 bp, Severe acute respiratory syndrome coronavirus 2
acgttaacaatattgcagc

SEQ ID NO: 1984 - DNA, 19 bp, Severe acute respiratory syndrome coronavirus 2
cacgttaacaatattgcag

SEQ ID NO: 1985 - DNA, 19 bp, Severe acute respiratory syndrome coronavirus 2
tcacgttaacaatattgca

SEQ ID NO: 1986 - DNA, 19 bp, Severe acute respiratory syndrome coronavirus 2
ctcacgttaacaatattgc

SEQ ID NO: 1987 - DNA, 19 bp, Severe acute respiratory syndrome coronavirus 2
actcacgttaacaatattg

SEQ ID NO: 1988 - DNA, 19 bp, Severe acute respiratory syndrome coronavirus 2
accagaagatcaggaactc

SEQ ID NO: 1989 - DNA, 19 bp, Severe acute respiratory syndrome coronavirus 2
gaccagaagatcaggaact

SEQ ID NO: 1990 - DNA, 19 bp, Severe acute respiratory syndrome coronavirus 2
agaccagaagatcaggaac

SEQ ID NO: 1991 - DNA, 19 bp, Severe acute respiratory syndrome coronavirus 2
tagaccagaagatcaggaa

SEQ ID NO: 1992 - DNA, 19 bp, Severe acute respiratory syndrome coronavirus 2
ttagaccagaagatcagga

SEQ ID NO: 1993 - DNA, 19 bp, Severe acute respiratory syndrome coronavirus 2
tttagaccagaagatcagg

SEQ ID NO: 1994 - DNA, 19 bp, Severe acute respiratory syndrome coronavirus 2
gtttagaccagaagatcag

SEQ ID NO: 1995 - DNA, 19 bp, Severe acute respiratory syndrome coronavirus 2
cgtttagaccagaagatca

SEQ ID NO: 1996 - DNA, 19 bp, Severe acute respiratory syndrome coronavirus 2
tcgtttagaccagaagatc

SEQ ID NO: 1997 - DNA, 19 bp, Severe acute respiratory syndrome coronavirus 2
ttcgtttagaccagaagat

SEQ ID NO: 1998 - DNA, 19 bp, Severe acute respiratory syndrome coronavirus 2
gttcgtttagaccagaaga

SEQ ID NO: 1999 - DNA, 19 bp, Severe acute respiratory syndrome coronavirus 2
agttcgtttagaccagaag

SEQ ID NO: 2000 - DNA, 19 bp, Severe acute respiratory syndrome coronavirus 2
tagttcgtttagaccagaa

SEQ ID NO: 2001 - DNA, 19 bp, Severe acute respiratory syndrome coronavirus 2
ttagttcgtttagaccaga

SEQ ID NO: 2002 - DNA, 19 bp, Severe acute respiratory syndrome coronavirus 2
ttactaggttccattgttc

SEQ ID NO: 2003 - DNA, 19 bp, Severe acute respiratory syndrome coronavirus 2
attactaggttccattgtt

SEQ ID NO: 2004 - DNA, 19 bp, Severe acute respiratory syndrome coronavirus 2
tattactaggttccattgt

SEQ ID NO: 2005 - DNA, 19 bp, Severe acute respiratory syndrome coronavirus 2
ctattactaggttccattg

SEQ ID NO: 2006 - DNA, 19 bp, Severe acute respiratory syndrome coronavirus 2
cctattactaggttccatt

SEQ ID NO: 2007 - DNA, 19 bp, Severe acute respiratory syndrome coronavirus 2
acctattactaggttccat

SEQ ID NO: 2008 - DNA, 19 bp, Severe acute respiratory syndrome coronavirus 2
aacctattactaggttcca

SEQ ID NO: 2009 - DNA, 19 bp, Severe acute respiratory syndrome coronavirus 2
aaacctattactaggttcc

SEQ ID NO: 2010 - DNA, 19 bp, Severe acute respiratory syndrome coronavirus 2
gaaacctattactaggttc

SEQ ID NO: 2011 - DNA, 19 bp, Severe acute respiratory syndrome coronavirus 2
aaagcgttcgtgatgtagc

SEQ ID NO: 2012 - DNA, 19 bp, Severe acute respiratory syndrome coronavirus 2
gaaagcgttcgtgatgtag

SEQ ID NO: 2013 - DNA, 19 bp, Severe acute respiratory syndrome coronavirus 2
agaaagcgttcgtgatgta

SEQ ID NO: 2014 - DNA, 19 bp, Severe acute respiratory syndrome coronavirus 2
aagaaagcgttcgtgatgt

SEQ ID NO: 2015 - DNA, 19 bp, Severe acute respiratory syndrome coronavirus 2
taagaaagcgttcgtgatg

SEQ ID NO: 2016 - DNA, 19 bp, Severe acute respiratory syndrome coronavirus 2
ataagaaagcgttcgtgat

SEQ ID NO: 2017 - DNA, 19 bp, Severe acute respiratory syndrome coronavirus 2
aataagaaagcgttcgtga

SEQ ID NO: 2018 - DNA, 19 bp, Severe acute respiratory syndrome coronavirus 2
taataagaaagcgttcgtg

SEQ ID NO: 2019 - DNA, 19 bp, Severe acute respiratory syndrome coronavirus 2
gtaataagaaagcgttcgt

SEQ ID NO: 2020 - DNA, 19 bp, Severe acute respiratory syndrome coronavirus 2
tgtaataagaaagcgttcg

SEQ ID NO: 2021 - DNA, 19 bp, Severe acute respiratory syndrome coronavirus 2
ttgtaataagaaagcgttc

SEQ ID NO: 2022 - DNA, 19 bp, Severe acute respiratory syndrome coronavirus 2
tttgtaataagaaagcgtt

SEQ ID NO: 2023 - DNA, 19 bp, Severe acute respiratory syndrome coronavirus 2
atttgtaataagaaagcgt

SEQ ID NO: 2024 - DNA, 19 bp, Severe acute respiratory syndrome coronavirus 2
aatttgtaataagaaagcg

SEQ ID NO: 2025 - DNA, 19 bp, Severe acute respiratory syndrome coronavirus 2
tgtatgcagcaaaacctga

SEQ ID NO: 2026 - DNA, 19 bp, Severe acute respiratory syndrome coronavirus 2
ctgttgtcacttactgtac

SEQ ID NO: 2027 - DNA, 19 bp, Severe acute respiratory syndrome coronavirus 2
tctgttgtcacttactgta

SEQ ID NO: 2028 - DNA, 19 bp, Severe acute respiratory syndrome coronavirus 2
atctgttgtcacttactgt

SEQ ID NO: 2029 - DNA, 19 bp, Severe acute respiratory syndrome coronavirus 2
catctgttgtcacttactg

SEQ ID NO: 2030 - DNA, 19 bp, Severe acute respiratory syndrome coronavirus 2
acatctgttgtcacttact

SEQ ID NO: 2031 - DNA, 19 bp, Severe acute respiratory syndrome coronavirus 2
aacatctgttgtcacttac

SEQ ID NO: 2032 - DNA, 19 bp, Severe acute respiratory syndrome coronavirus 2
aaacatctgttgtcactta

SEQ ID NO: 2033 - DNA, 19 bp, Severe acute respiratory syndrome coronavirus 2
gaaacatctgttgtcactt

SEQ ID NO: 2034 - DNA, 19 bp, Severe acute respiratory syndrome coronavirus 2
tgaaacatctgttgtcact

SEQ ID NO: 2035 - DNA, 19 bp, Severe acute respiratory syndrome coronavirus 2
atgaaacatctgttgtcac

SEQ ID NO: 2036 - DNA, 19 bp, Severe acute respiratory syndrome coronavirus 2
gatgaaacatctgttgtca

SEQ ID NO: 2037 - DNA, 19 bp, Severe acute respiratory syndrome coronavirus 2
agatgaaacatctgttgtc

SEQ ID NO: 2038 - DNA, 19 bp, Severe acute respiratory syndrome coronavirus 2
ttttcatgttcgtttaatc

SEQ ID NO: 2039 - DNA, 19 bp, Severe acute respiratory syndrome coronavirus 2
attttcatgttcgtttaat

SEQ ID NO: 2040 - DNA, 19 bp, Severe acute respiratory syndrome coronavirus 2
aattttcatgttcgtttaa

SEQ ID NO: 2041 - DNA, 19 bp, Severe acute respiratory syndrome coronavirus 2
taattttcatgttcgttta

SEQ ID NO: 2042 - DNA, 19 bp, Severe acute respiratory syndrome coronavirus 2
ataattttcatgttcgttt

SEQ ID NO: 2043 - DNA, 19 bp, Severe acute respiratory syndrome coronavirus 2
aataattttcatgttcgtt

SEQ ID NO: 2044 - DNA, 19 bp, Severe acute respiratory syndrome coronavirus 2
gaataattttcatgttcgt

SEQ ID NO: 2045 - DNA, 19 bp, Severe acute respiratory syndrome coronavirus 2
agaataattttcatgttcg

SEQ ID NO: 2046 - DNA, 19 bp, Severe acute respiratory syndrome coronavirus 2
atggtgaattgccctcgta

SEQ ID NO: 2047 - DNA, 19 bp, Severe acute respiratory syndrome coronavirus 2
aatggtgaattgccctcgt

SEQ ID NO: 2048 - DNA, 19 bp, Severe acute respiratory syndrome coronavirus 2
aaatggtgaattgccctcg

SEQ ID NO: 2049 - DNA, 19 bp, Severe acute respiratory syndrome coronavirus 2
gaaatggtgaattgccctc

SEQ ID NO: 2050 - DNA, 19 bp, Severe acute respiratory syndrome coronavirus 2
tgaaatggtgaattgccct

SEQ ID NO: 2051 - DNA, 19 bp, Severe acute respiratory syndrome coronavirus 2
acaaatagaagtcaattaa

SEQ ID NO: 2052 - DNA, 19 bp, Severe acute respiratory syndrome coronavirus 2
cacaaatagaagtcaatta

SEQ ID NO: 2053 - DNA, 19 bp, Severe acute respiratory syndrome coronavirus 2
gcacaaatagaagtcaatt

SEQ ID NO: 2054 - DNA, 19 bp, Severe acute respiratory syndrome coronavirus 2
agcacaaatagaagtcaat

SEQ ID NO: 2055 - DNA, 19 bp, Severe acute respiratory syndrome coronavirus 2
aagcacaaatagaagtcaa

SEQ ID NO: 2056 - DNA, 19 bp, Severe acute respiratory syndrome coronavirus 2
aaagcacaaatagaagtca

SEQ ID NO: 2057 - DNA, 19 bp, Severe acute respiratory syndrome coronavirus 2
aaaagcacaaatagaagtc

SEQ ID NO: 2058 - DNA, 19 bp, Severe acute respiratory syndrome coronavirus 2
aaaaagcacaaatagaagt

SEQ ID NO: 2059 - DNA, 19 bp, Severe acute respiratory syndrome coronavirus 2
taaaaagcacaaatagaag

SEQ ID NO: 2060 - DNA, 19 bp, Severe acute respiratory syndrome coronavirus 2
ctaaaaagcacaaatagaa

SEQ ID NO: 2061 - DNA, 19 bp, Severe acute respiratory syndrome coronavirus 2
gctaaaaagcacaaataga

SEQ ID NO: 2062 - DNA, 19 bp, Severe acute respiratory syndrome coronavirus 2
ggctaaaaagcacaaatag

SEQ ID NO: 2063 - DNA, 19 bp, Severe acute respiratory syndrome coronavirus 2
aggctaaaaagcacaaata

SEQ ID NO: 2064 - DNA, 19 bp, Severe acute respiratory syndrome coronavirus 2
aaggctaaaaagcacaaat

SEQ ID NO: 2065 - DNA, 19 bp, Severe acute respiratory syndrome coronavirus 2
aaaggctaaaaagcacaaa

SEQ ID NO: 2066 - DNA, 19 bp, Severe acute respiratory syndrome coronavirus 2
gaaaggctaaaaagcacaa

SEQ ID NO: 2067 - DNA, 19 bp, Severe acute respiratory syndrome coronavirus 2
agaaaggctaaaaagcaca

SEQ ID NO: 2068 - DNA, 19 bp, Severe acute respiratory syndrome coronavirus 2
cagaaaggctaaaaagcac

SEQ ID NO: 2069 - DNA, 19 bp, Severe acute respiratory syndrome coronavirus 2
gcagaaaggctaaaaagca

SEQ ID NO: 2070 - DNA, 19 bp, Severe acute respiratory syndrome coronavirus 2
agcagaaaggctaaaaagc

SEQ ID NO: 2071 - DNA, 19 bp, Severe acute respiratory syndrome coronavirus 2
tagcagaaaggctaaaaag

SEQ ID NO: 2072 - DNA, 19 bp, Severe acute respiratory syndrome coronavirus 2
atagcagaaaggctaaaaa

SEQ ID NO: 2073 - DNA, 19 bp, Severe acute respiratory syndrome coronavirus 2
aatagcagaaaggctaaaa

SEQ ID NO: 2074 - DNA, 19 bp, Severe acute respiratory syndrome coronavirus 2
gaatagcagaaaggctaaa

SEQ ID NO: 2075 - DNA, 19 bp, Severe acute respiratory syndrome coronavirus 2
ggaatagcagaaaggctaa

SEQ ID NO: 2076 - DNA, 19 bp, Severe acute respiratory syndrome coronavirus 2
aggaatagcagaaaggcta

SEQ ID NO: 2077 - DNA, 19 bp, Severe acute respiratory syndrome coronavirus 2
aaggaatagcagaaaggct

SEQ ID NO: 2078 - DNA, 19 bp, Severe acute respiratory syndrome coronavirus 2
caaggaatagcagaaaggc

SEQ ID NO: 2079 - DNA, 19 bp, Severe acute respiratory syndrome coronavirus 2
acaaggaatagcagaaagg

SEQ ID NO: 2080 - DNA, 19 bp, Severe acute respiratory syndrome coronavirus 2
aacaaggaatagcagaaag

SEQ ID NO: 2081 - DNA, 19 bp, Severe acute respiratory syndrome coronavirus 2
tccattatcagacatttta

SEQ ID NO: 2082 - DNA, 19 bp, Severe acute respiratory syndrome coronavirus 2
gtccattatcagacatttt

SEQ ID NO: 2083 - DNA, 19 bp, Severe acute respiratory syndrome coronavirus 2
ggtccattatcagacattt

SEQ ID NO: 2084 - DNA, 19 bp, Severe acute respiratory syndrome coronavirus 2
gggtccattatcagacatt

SEQ ID NO: 2085 - DNA, 19 bp, Severe acute respiratory syndrome coronavirus 2
ggggtccattatcagacat

SEQ ID NO: 2086 - DNA, 19 bp, Severe acute respiratory syndrome coronavirus 2
tggggtccattatcagaca

SEQ ID NO: 2087 - DNA, 19 bp, Severe acute respiratory syndrome coronavirus 2
ttggggtccattatcagac

SEQ ID NO: 2088 - DNA, 19 bp, Severe acute respiratory syndrome coronavirus 2
tttggggtccattatcaga

SEQ ID NO: 2089 - DNA, 19 bp, Severe acute respiratory syndrome coronavirus 2
ttttggggtccattatcag

SEQ ID NO: 2090 - DNA, 19 bp, Severe acute respiratory syndrome coronavirus 2
tattgggtaaaccttgggg

SEQ ID NO: 2091 - DNA, 19 bp, Severe acute respiratory syndrome coronavirus 2
ttattgggtaaaccttggg

SEQ ID NO: 2092 - DNA, 19 bp, Severe acute respiratory syndrome coronavirus 2
attattgggtaaaccttgg

SEQ ID NO: 2093 - DNA, 19 bp, Severe acute respiratory syndrome coronavirus 2
tattattgggtaaaccttg

SEQ ID NO: 2094 - DNA, 19 bp, Severe acute respiratory syndrome coronavirus 2
gtattattgggtaaacctt

SEQ ID NO: 2095 - DNA, 19 bp, Severe acute respiratory syndrome coronavirus 2
agtattattgggtaaacct

SEQ ID NO: 2096 - DNA, 19 bp, Severe acute respiratory syndrome coronavirus 2
cagtattattgggtaaacc

SEQ ID NO: 2097 - DNA, 19 bp, Severe acute respiratory syndrome coronavirus 2
gcagtattattgggtaaac

SEQ ID NO: 2098 - DNA, 19 bp, Severe acute respiratory syndrome coronavirus 2
cgcagtattattgggtaaa

SEQ ID NO: 2099 - DNA, 19 bp, Severe acute respiratory syndrome coronavirus 2
acgcagtattattgggtaa

SEQ ID NO: 2100 - DNA, 19 bp, Severe acute respiratory syndrome coronavirus 2
gacgcagtattattgggta

SEQ ID NO: 2101 - DNA, 19 bp, Severe acute respiratory syndrome coronavirus 2
agacgcagtattattgggt

SEQ ID NO: 2102 - DNA, 19 bp, Severe acute respiratory syndrome coronavirus 2
aagacgcagtattattggg

SEQ ID NO: 2103 - DNA, 19 bp, Severe acute respiratory syndrome coronavirus 2
caagacgcagtattattgg

SEQ ID NO: 2104 - DNA, 19 bp, Severe acute respiratory syndrome coronavirus 2
ccaagacgcagtattattg

SEQ ID NO: 2105 - DNA, 19 bp, Severe acute respiratory syndrome coronavirus 2
accaagacgcagtattatt

SEQ ID NO: 2106 - DNA, 19 bp, Severe acute respiratory syndrome coronavirus 2
aaccaagacgcagtattat

SEQ ID NO: 2107 - DNA, 19 bp, Severe acute respiratory syndrome coronavirus 2
gaaccaagacgcagtatta

SEQ ID NO: 2108 - DNA, 19 bp, Severe acute respiratory syndrome coronavirus 2
tgaaccaagacgcagtatt

SEQ ID NO: 2109 - DNA, 19 bp, Severe acute respiratory syndrome coronavirus 2
gtgaaccaagacgcagtat

SEQ ID NO: 2110 - DNA, 19 bp, Severe acute respiratory syndrome coronavirus 2
gtagccaatttggtcatct

SEQ ID NO: 2111 - DNA, 19 bp, Severe acute respiratory syndrome coronavirus 2
agtagccaatttggtcatc

SEQ ID NO: 2112 - DNA, 19 bp, Severe acute respiratory syndrome coronavirus 2
tagtagccaatttggtcat

SEQ ID NO: 2113 - DNA, 19 bp, Severe acute respiratory syndrome coronavirus 2
gtagtagccaatttggtca

SEQ ID NO: 2114 - DNA, 19 bp, Severe acute respiratory syndrome coronavirus 2
ggtagtagccaatttggtc

SEQ ID NO: 2115 - DNA, 19 bp, Severe acute respiratory syndrome coronavirus 2
cggtagtagccaatttggt

SEQ ID NO: 2116 - DNA, 19 bp, Severe acute respiratory syndrome coronavirus 2
tcggtagtagccaatttgg

SEQ ID NO: 2117 - DNA, 19 bp, Severe acute respiratory syndrome coronavirus 2
ttcggtagtagccaatttg

SEQ ID NO: 2118 - DNA, 19 bp, Severe acute respiratory syndrome coronavirus 2
cttcggtagtagccaattt

SEQ ID NO: 2119 - DNA, 19 bp, Severe acute respiratory syndrome coronavirus 2
tcttcggtagtagccaatt

SEQ ID NO: 2120 - DNA, 19 bp, Severe acute respiratory syndrome coronavirus 2
ctcttcggtagtagccaat

SEQ ID NO: 2121 - DNA, 19 bp, Severe acute respiratory syndrome coronavirus 2
gctcttcggtagtagccaa

SEQ ID NO: 2122 - DNA, 19 bp, Severe acute respiratory syndrome coronavirus 2
agctcttcggtagtagcca

SEQ ID NO: 2123 - DNA, 19 bp, Severe acute respiratory syndrome coronavirus 2
tagctcttcggtagtagcc

SEQ ID NO: 2124 - DNA, 19 bp, Severe acute respiratory syndrome coronavirus 2
gtagctcttcggtagtagc

SEQ ID NO: 2125 - DNA, 19 bp, Severe acute respiratory syndrome coronavirus 2
ggtagctcttcggtagtag

SEQ ID NO: 2126 - DNA, 19 bp, Severe acute respiratory syndrome coronavirus 2
tcaaggctccctcagttgc

SEQ ID NO: 2127 - DNA, 19 bp, Severe acute respiratory syndrome coronavirus 2
ttcaaggctccctcagttg

SEQ ID NO: 2128 - DNA, 19 bp, Severe acute respiratory syndrome coronavirus 2
gattgcgggtgccaatgtg

SEQ ID NO: 2129 - DNA, 19 bp, Severe acute respiratory syndrome coronavirus 2
ggattgcgggtgccaatgt

SEQ ID NO: 2130 - DNA, 19 bp, Severe acute respiratory syndrome coronavirus 2
aggattgcgggtgccaatg

SEQ ID NO: 2131 - DNA, 19 bp, Severe acute respiratory syndrome coronavirus 2
ttgaggaagttgtagcacg

SEQ ID NO: 2132 - DNA, 19 bp, Severe acute respiratory syndrome coronavirus 2
cttgaggaagttgtagcac

SEQ ID NO: 2133 - DNA, 19 bp, Severe acute respiratory syndrome coronavirus 2
ccttgaggaagttgtagca

SEQ ID NO: 2134 - DNA, 19 bp, Severe acute respiratory syndrome coronavirus 2
tccttgaggaagttgtagc

SEQ ID NO: 2135 - DNA, 19 bp, Severe acute respiratory syndrome coronavirus 2
ttccttgaggaagttgtag

SEQ ID NO: 2136 - DNA, 19 bp, Severe acute respiratory syndrome coronavirus 2
gttccttgaggaagttgta

SEQ ID NO: 2137 - DNA, 19 bp, Severe acute respiratory syndrome coronavirus 2
tgttccttgaggaagttgt

SEQ ID NO: 2138 - DNA, 19 bp, Severe acute respiratory syndrome coronavirus 2
ttgttccttgaggaagttg

SEQ ID NO: 2139 - DNA, 19 bp, Severe acute respiratory syndrome coronavirus 2
gttgttccttgaggaagtt

SEQ ID NO: 2140 - DNA, 19 bp, Severe acute respiratory syndrome coronavirus 2
tgttgttccttgaggaagt

SEQ ID NO: 2141 - DNA, 19 bp, Severe acute respiratory syndrome coronavirus 2
atgttgttccttgaggaag

SEQ ID NO: 2142 - DNA, 19 bp, Severe acute respiratory syndrome coronavirus 2
aatgttgttccttgaggaa

SEQ ID NO: 2143 - DNA, 19 bp, Severe acute respiratory syndrome coronavirus 2
caatgttgttccttgagga

SEQ ID NO: 2144 - DNA, 19 bp, Severe acute respiratory syndrome coronavirus 2
gcaatgttgttccttgagg

SEQ ID NO: 2145 - DNA, 19 bp, Severe acute respiratory syndrome coronavirus 2
ggcaatgttgttccttgag

SEQ ID NO: 2146 - DNA, 19 bp, Severe acute respiratory syndrome coronavirus 2
tggcaatgttgttccttga

SEQ ID NO: 2147 - DNA, 19 bp, Severe acute respiratory syndrome coronavirus 2
ttggcaatgttgttccttg

SEQ ID NO: 2148 - DNA, 19 bp, Severe acute respiratory syndrome coronavirus 2
tttggcaatgttgttcctt

SEQ ID NO: 2149 - DNA, 19 bp, Severe acute respiratory syndrome coronavirus 2
ttttggcaatgttgttcct

SEQ ID NO: 2150 - DNA, 19 bp, Severe acute respiratory syndrome coronavirus 2
cttttggcaatgttgttcc

SEQ ID NO: 2151 - DNA, 19 bp, Severe acute respiratory syndrome coronavirus 2
ccttttggcaatgttgttc

SEQ ID NO: 2152 - DNA, 19 bp, Severe acute respiratory syndrome coronavirus 2
gccttttggcaatgttgtt

SEQ ID NO: 2153 - DNA, 19 bp, Severe acute respiratory syndrome coronavirus 2
agccttttggcaatgttgt

SEQ ID NO: 2154 - DNA, 19 bp, Severe acute respiratory syndrome coronavirus 2
aagccttttggcaatgttg

SEQ ID NO: 2155 - DNA, 19 bp, Severe acute respiratory syndrome coronavirus 2
gaagccttttggcaatgtt

SEQ ID NO: 2156 - DNA, 19 bp, Severe acute respiratory syndrome coronavirus 2
agaagccttttggcaatgt

SEQ ID NO: 2157 - DNA, 19 bp, Severe acute respiratory syndrome coronavirus 2
tagaagccttttggcaatg

SEQ ID NO: 2158 - DNA, 19 bp, Severe acute respiratory syndrome coronavirus 2
gtagaagccttttggcaat

SEQ ID NO: 2159 - DNA, 19 bp, Severe acute respiratory syndrome coronavirus 2
cgtagaagccttttggcaa

SEQ ID NO: 2160 - DNA, 19 bp, Severe acute respiratory syndrome coronavirus 2
gcgtagaagccttttggca

SEQ ID NO: 2161 - DNA, 19 bp, Severe acute respiratory syndrome coronavirus 2
tgcgtagaagccttttggc

SEQ ID NO: 2162 - DNA, 19 bp, Severe acute respiratory syndrome coronavirus 2
ctgcgtagaagccttttgg

SEQ ID NO: 2163 - DNA, 19 bp, Severe acute respiratory syndrome coronavirus 2
tctgcgtagaagccttttg

SEQ ID NO: 2164 - DNA, 19 bp, Severe acute respiratory syndrome coronavirus 2
cttgactgccgcctctgct

SEQ ID NO: 2165 - DNA, 19 bp, Severe acute respiratory syndrome coronavirus 2
gcttgactgccgcctctgc

SEQ ID NO: 2166 - DNA, 19 bp, Severe acute respiratory syndrome coronavirus 2
ggcttgactgccgcctctg

SEQ ID NO: 2167 - DNA, 19 bp, Severe acute respiratory syndrome coronavirus 2
aggcttgactgccgcctct

SEQ ID NO: 2168 - DNA, 19 bp, Severe acute respiratory syndrome coronavirus 2
gaggcttgactgccgcctc

SEQ ID NO: 2169 - DNA, 19 bp, Severe acute respiratory syndrome coronavirus 2
agaggcttgactgccgcct

SEQ ID NO: 2170 - DNA, 19 bp, Severe acute respiratory syndrome coronavirus 2
aagaggcttgactgccgcc

SEQ ID NO: 2171 - DNA, 19 bp, Severe acute respiratory syndrome coronavirus 2
gaagaggcttgactgccgc

SEQ ID NO: 2172 - DNA, 19 bp, Severe acute respiratory syndrome coronavirus 2
agaagaggcttgactgccg

SEQ ID NO: 2173 - DNA, 19 bp, Severe acute respiratory syndrome coronavirus 2
gagaagaggcttgactgcc

SEQ ID NO: 2174 - DNA, 19 bp, Severe acute respiratory syndrome coronavirus 2
cgagaagaggcttgactgc

SEQ ID NO: 2175 - DNA, 19 bp, Severe acute respiratory syndrome coronavirus 2
caagctggttcaatctgtc

SEQ ID NO: 2176 - DNA, 19 bp, Severe acute respiratory syndrome coronavirus 2
tcaagctggttcaatctgt

SEQ ID NO: 2177 - DNA, 19 bp, Severe acute respiratory syndrome coronavirus 2
ctcaagctggttcaatctg

SEQ ID NO: 2178 - DNA, 19 bp, Severe acute respiratory syndrome coronavirus 2
tctcaagctggttcaatct

SEQ ID NO: 2179 - DNA, 19 bp, Severe acute respiratory syndrome coronavirus 2
ctctcaagctggttcaatc

SEQ ID NO: 2180 - DNA, 19 bp, Severe acute respiratory syndrome coronavirus 2
gctctcaagctggttcaat

SEQ ID NO: 2181 - DNA, 19 bp, Severe acute respiratory syndrome coronavirus 2
tgctctcaagctggttcaa

SEQ ID NO: 2182 - DNA, 19 bp, Severe acute respiratory syndrome coronavirus 2
ttgctctcaagctggttca

SEQ ID NO: 2183 - DNA, 19 bp, Severe acute respiratory syndrome coronavirus 2
tttgctctcaagctggttc

SEQ ID NO: 2184 - DNA, 19 bp, Severe acute respiratory syndrome coronavirus 2
gttgttggcctttaccaga

SEQ ID NO: 2185 - DNA, 19 bp, Severe acute respiratory syndrome coronavirus 2
tgttgttggcctttaccag

SEQ ID NO: 2186 - DNA, 19 bp, Severe acute respiratory syndrome coronavirus 2
ttgttgttggcctttacca

SEQ ID NO: 2187 - DNA, 19 bp, Severe acute respiratory syndrome coronavirus 2
gttgttgttggcctttacc

SEQ ID NO: 2188 - DNA, 19 bp, Severe acute respiratory syndrome coronavirus 2
tgttgttgttggcctttac

SEQ ID NO: 2189 - DNA, 19 bp, Severe acute respiratory syndrome coronavirus 2
ttgttgttgttggccttta

SEQ ID NO: 2190 - DNA, 19 bp, Severe acute respiratory syndrome coronavirus 2
cttgttgttgttggccttt

SEQ ID NO: 2191 - DNA, 19 bp, Severe acute respiratory syndrome coronavirus 2
ccttgttgttgttggcctt

SEQ ID NO: 2192 - DNA, 19 bp, Severe acute respiratory syndrome coronavirus 2
gccttgttgttgttggcct

SEQ ID NO: 2193 - DNA, 19 bp, Severe acute respiratory syndrome coronavirus 2
ggccttgttgttgttggcc

SEQ ID NO: 2194 - DNA, 19 bp, Severe acute respiratory syndrome coronavirus 2
tggccttgttgttgttggc

SEQ ID NO: 2195 - DNA, 19 bp, Severe acute respiratory syndrome coronavirus 2
ttggccttgttgttgttgg

SEQ ID NO: 2196 - DNA, 19 bp, Severe acute respiratory syndrome coronavirus 2
tttggccttgttgttgttg

SEQ ID NO: 2197 - DNA, 19 bp, Severe acute respiratory syndrome coronavirus 2
gtttggccttgttgttgtt

SEQ ID NO: 2198 - DNA, 19 bp, Severe acute respiratory syndrome coronavirus 2
agtttggccttgttgttgt

SEQ ID NO: 2199 - DNA, 19 bp, Severe acute respiratory syndrome coronavirus 2
cagtttggccttgttgttg

SEQ ID NO: 2200 - DNA, 19 bp, Severe acute respiratory syndrome coronavirus 2
acagtttggccttgttgtt

SEQ ID NO: 2201 - DNA, 19 bp, Severe acute respiratory syndrome coronavirus 2
gacagtttggccttgttgt

SEQ ID NO: 2202 - DNA, 19 bp, Severe acute respiratory syndrome coronavirus 2
tgacagtttggccttgttg

SEQ ID NO: 2203 - DNA, 19 bp, Severe acute respiratory syndrome coronavirus 2
gtgacagtttggccttgtt

SEQ ID NO: 2204 - DNA, 19 bp, Severe acute respiratory syndrome coronavirus 2
agtgacagtttggccttgt

SEQ ID NO: 2205 - DNA, 19 bp, Severe acute respiratory syndrome coronavirus 2
tagtgacagtttggccttg

SEQ ID NO: 2206 - DNA, 19 bp, Severe acute respiratory syndrome coronavirus 2
ttagtgacagtttggcctt

SEQ ID NO: 2207 - DNA, 19 bp, Severe acute respiratory syndrome coronavirus 2
cttagtgacagtttggcct

SEQ ID NO: 2208 - DNA, 19 bp, Severe acute respiratory syndrome coronavirus 2
tcttagtgacagtttggcc

SEQ ID NO: 2209 - DNA, 19 bp, Severe acute respiratory syndrome coronavirus 2
ttcttagtgacagtttggc

SEQ ID NO: 2210 - DNA, 19 bp, Severe acute respiratory syndrome coronavirus 2
tttcttagtgacagtttgg

SEQ ID NO: 2211 - DNA, 19 bp, Severe acute respiratory syndrome coronavirus 2
atttcttagtgacagtttg

SEQ ID NO: 2212 - DNA, 19 bp, Severe acute respiratory syndrome coronavirus 2
gatttcttagtgacagttt

SEQ ID NO: 2213 - DNA, 19 bp, Severe acute respiratory syndrome coronavirus 2
agatttcttagtgacagtt

SEQ ID NO: 2214 - DNA, 19 bp, Severe acute respiratory syndrome coronavirus 2
cagatttcttagtgacagt

SEQ ID NO: 2215 - DNA, 19 bp, Severe acute respiratory syndrome coronavirus 2
gcagatttcttagtgacag

SEQ ID NO: 2216 - DNA, 19 bp, Severe acute respiratory syndrome coronavirus 2
agcagatttcttagtgaca

SEQ ID NO: 2217 - DNA, 19 bp, Severe acute respiratory syndrome coronavirus 2
cagcagatttcttagtgac

SEQ ID NO: 2218 - DNA, 19 bp, Severe acute respiratory syndrome coronavirus 2
gcagcagatttcttagtga

SEQ ID NO: 2219 - DNA, 19 bp, Severe acute respiratory syndrome coronavirus 2
agcagcagatttcttagtg

SEQ ID NO: 2220 - DNA, 19 bp, Severe acute respiratory syndrome coronavirus 2
cagcagcagatttcttagt

SEQ ID NO: 2221 - DNA, 19 bp, Severe acute respiratory syndrome coronavirus 2
tcagcagcagatttcttag

SEQ ID NO: 2222 - DNA, 19 bp, Severe acute respiratory syndrome coronavirus 2
ctcagcagcagatttctta

SEQ ID NO: 2223 - DNA, 19 bp, Severe acute respiratory syndrome coronavirus 2
cctcagcagcagatttctt

SEQ ID NO: 2224 - DNA, 19 bp, Severe acute respiratory syndrome coronavirus 2
gcctcagcagcagatttct

SEQ ID NO: 2225 - DNA, 19 bp, Severe acute respiratory syndrome coronavirus 2
cagttccttgtctgattag

SEQ ID NO: 2226 - DNA, 19 bp, Severe acute respiratory syndrome coronavirus 2
tcagttccttgtctgatta

SEQ ID NO: 2227 - DNA, 19 bp, Severe acute respiratory syndrome coronavirus 2
atcagttccttgtctgatt

SEQ ID NO: 2228 - DNA, 19 bp, Severe acute respiratory syndrome coronavirus 2
aatcagttccttgtctgat

SEQ ID NO: 2229 - DNA, 19 bp, Severe acute respiratory syndrome coronavirus 2
taatcagttccttgtctga

SEQ ID NO: 2230 - DNA, 19 bp, Severe acute respiratory syndrome coronavirus 2
gtaatcagttccttgtctg

SEQ ID NO: 2231 - DNA, 19 bp, Severe acute respiratory syndrome coronavirus 2
tgtaatcagttccttgtct

SEQ ID NO: 2232 - DNA, 19 bp, Severe acute respiratory syndrome coronavirus 2
ttgtaatcagttccttgtc

SEQ ID NO: 2233 - DNA, 19 bp, Severe acute respiratory syndrome coronavirus 2
tttgtaatcagttccttgt

SEQ ID NO: 2234 - DNA, 19 bp, Severe acute respiratory syndrome coronavirus 2
gtttgtaatcagttccttg

SEQ ID NO: 2235 - DNA, 19 bp, Severe acute respiratory syndrome coronavirus 2
tgtttgtaatcagttcctt

SEQ ID NO: 2236 - DNA, 19 bp, Severe acute respiratory syndrome coronavirus 2
attgtgcaatttgcggcca

SEQ ID NO: 2237 - DNA, 19 bp, Severe acute respiratory syndrome coronavirus 2
aattgtgcaatttgcggcc

SEQ ID NO: 2238 - DNA, 19 bp, Severe acute respiratory syndrome coronavirus 2
aaattgtgcaatttgcggc

SEQ ID NO: 2239 - DNA, 19 bp, Severe acute respiratory syndrome coronavirus 2
caaattgtgcaatttgcgg

SEQ ID NO: 2240 - DNA, 19 bp, Severe acute respiratory syndrome coronavirus 2
gcaaattgtgcaatttgcg

SEQ ID NO: 2241 - DNA, 19 bp, Severe acute respiratory syndrome coronavirus 2
tgacttccatgccaatgcg

SEQ ID NO: 2242 - DNA, 19 bp, Severe acute respiratory syndrome coronavirus 2
gtgacttccatgccaatgc

SEQ ID NO: 2243 - DNA, 19 bp, Severe acute respiratory syndrome coronavirus 2
tgtgacttccatgccaatg

SEQ ID NO: 2244 - DNA, 19 bp, Severe acute respiratory syndrome coronavirus 2
gtgtgacttccatgccaat

SEQ ID NO: 2245 - DNA, 19 bp, Severe acute respiratory syndrome coronavirus 2
ggtgtgacttccatgccaa

SEQ ID NO: 2246 - DNA, 19 bp, Severe acute respiratory syndrome coronavirus 2
aggtgtgacttccatgcca

SEQ ID NO: 2247 - DNA, 19 bp, Severe acute respiratory syndrome coronavirus 2
aaggtgtgacttccatgcc

SEQ ID NO: 2248 - DNA, 19 bp, Severe acute respiratory syndrome coronavirus 2
gaaggtgtgacttccatgc

SEQ ID NO: 2249 - DNA, 19 bp, Severe acute respiratory syndrome coronavirus 2
cgaaggtgtgacttccatg

SEQ ID NO: 2250 - DNA, 19 bp, Severe acute respiratory syndrome coronavirus 2
ccgaaggtgtgacttccat

SEQ ID NO: 2251 - DNA, 19 bp, Severe acute respiratory syndrome coronavirus 2
cccgaaggtgtgacttcca

SEQ ID NO: 2252 - DNA, 19 bp, Severe acute respiratory syndrome coronavirus 2
tcccgaaggtgtgacttcc

SEQ ID NO: 2253 - DNA, 19 bp, Severe acute respiratory syndrome coronavirus 2
ttcccgaaggtgtgacttc

SEQ ID NO: 2254 - DNA, 19 bp, Severe acute respiratory syndrome coronavirus 2
gttcccgaaggtgtgactt

SEQ ID NO: 2255 - DNA, 19 bp, Severe acute respiratory syndrome coronavirus 2
gatctttgtcatccaattt

SEQ ID NO: 2256 - DNA, 19 bp, Severe acute respiratory syndrome coronavirus 2
ggatctttgtcatccaatt

SEQ ID NO: 2257 - DNA, 19 bp, Severe acute respiratory syndrome coronavirus 2
tggatctttgtcatccaat

SEQ ID NO: 2258 - DNA, 19 bp, Severe acute respiratory syndrome coronavirus 2
atgttttgtatgcgtcaat

SEQ ID NO: 2259 - DNA, 19 bp, Severe acute respiratory syndrome coronavirus 2
aatgttttgtatgcgtcaa

SEQ ID NO: 2260 - DNA, 19 bp, Severe acute respiratory syndrome coronavirus 2
gaatgttttgtatgcgtca

SEQ ID NO: 2261 - DNA, 19 bp, Severe acute respiratory syndrome coronavirus 2
ggaatgttttgtatgcgtc

SEQ ID NO: 2262 - DNA, 19 bp, Severe acute respiratory syndrome coronavirus 2
gggaatgttttgtatgcgt

SEQ ID NO: 2263 - DNA, 19 bp, Severe acute respiratory syndrome coronavirus 2
tgggaatgttttgtatgcg

SEQ ID NO: 2264 - DNA, 19 bp, Severe acute respiratory syndrome coronavirus 2
gtgggaatgttttgtatgc

SEQ ID NO: 2265 - DNA, 19 bp, Severe acute respiratory syndrome coronavirus 2
ggtgggaatgttttgtatg

SEQ ID NO: 2266 - DNA, 19 bp, Severe acute respiratory syndrome coronavirus 2
tggtgggaatgttttgtat

SEQ ID NO: 2267 - DNA, 19 bp, Severe acute respiratory syndrome coronavirus 2
ttggtgggaatgttttgta

SEQ ID NO: 2268 - DNA, 19 bp, Severe acute respiratory syndrome coronavirus 2
gttggtgggaatgttttgt

SEQ ID NO: 2269 - DNA, 19 bp, Severe acute respiratory syndrome coronavirus 2
tgttggtgggaatgttttg

SEQ ID NO: 2270 - DNA, 19 bp, Severe acute respiratory syndrome coronavirus 2
ctgttggtgggaatgtttt

SEQ ID NO: 2271 - DNA, 19 bp, Severe acute respiratory syndrome coronavirus 2
tctgttggtgggaatgttt

SEQ ID NO: 2272 - DNA, 19 bp, Severe acute respiratory syndrome coronavirus 2
ctctgttggtgggaatgtt

SEQ ID NO: 2273 - DNA, 19 bp, Severe acute respiratory syndrome coronavirus 2
gctctgttggtgggaatgt

SEQ ID NO: 2274 - DNA, 19 bp, Severe acute respiratory syndrome coronavirus 2
ggctctgttggtgggaatg

SEQ ID NO: 2275 - DNA, 19 bp, Severe acute respiratory syndrome coronavirus 2
aggctctgttggtgggaat

SEQ ID NO: 2276 - DNA, 19 bp, Severe acute respiratory syndrome coronavirus 2
taggctctgttggtgggaa

SEQ ID NO: 2277 - DNA, 19 bp, Severe acute respiratory syndrome coronavirus 2
ttaggctctgttggtggga

SEQ ID NO: 2278 - DNA, 19 bp, Severe acute respiratory syndrome coronavirus 2
tttaggctctgttggtggg

SEQ ID NO: 2279 - DNA, 19 bp, Severe acute respiratory syndrome coronavirus 2
ttttaggctctgttggtgg

SEQ ID NO: 2280 - DNA, 19 bp, Severe acute respiratory syndrome coronavirus 2
tttttaggctctgttggtg

SEQ ID NO: 2281 - DNA, 19 bp, Severe acute respiratory syndrome coronavirus 2
ctttttaggctctgttggt

SEQ ID NO: 2282 - DNA, 19 bp, Severe acute respiratory syndrome coronavirus 2
cctttttaggctctgttgg

SEQ ID NO: 2283 - DNA, 19 bp, Severe acute respiratory syndrome coronavirus 2
tcctttttaggctctgttg

SEQ ID NO: 2284 - DNA, 19 bp, Severe acute respiratory syndrome coronavirus 2
gtcctttttaggctctgtt

SEQ ID NO: 2285 - DNA, 19 bp, Severe acute respiratory syndrome coronavirus 2
tgtcctttttaggctctgt

SEQ ID NO: 2286 - DNA, 19 bp, Severe acute respiratory syndrome coronavirus 2
ttgtcctttttaggctctg

SEQ ID NO: 2287 - DNA, 19 bp, Severe acute respiratory syndrome coronavirus 2
tttgtcctttttaggctct

SEQ ID NO: 2288 - DNA, 19 bp, Severe acute respiratory syndrome coronavirus 2
ttttgtcctttttaggctc

SEQ ID NO: 2289 - DNA, 19 bp, Severe acute respiratory syndrome coronavirus 2
tttttgtcctttttaggct

SEQ ID NO: 2290 - DNA, 19 bp, Severe acute respiratory syndrome coronavirus 2
ctttttgtcctttttaggc

SEQ ID NO: 2291 - DNA, 19 bp, Severe acute respiratory syndrome coronavirus 2
tctttttgtcctttttagg

SEQ ID NO: 2292 - DNA, 19 bp, Severe acute respiratory syndrome coronavirus 2
ttctttttgtcctttttag

SEQ ID NO: 2293 - DNA, 19 bp, Severe acute respiratory syndrome coronavirus 2
caggaagaagagtcacagt

SEQ ID NO: 2294 - DNA, 19 bp, Severe acute respiratory syndrome coronavirus 2
gcaggaagaagagtcacag

SEQ ID NO: 2295 - DNA, 19 bp, Severe acute respiratory syndrome coronavirus 2
ccatctgccttgtgtggtc

SEQ ID NO: 2296 - DNA, 19 bp, Severe acute respiratory syndrome coronavirus 2
cccatctgccttgtgtggt

SEQ ID NO: 2297 - DNA, 19 bp, Severe acute respiratory syndrome coronavirus 2
gcccatctgccttgtgtgg

SEQ ID NO: 2298 - DNA, 19 bp, Severe acute respiratory syndrome coronavirus 2
agcccatctgccttgtgtg

SEQ ID NO: 2299 - DNA, 19 bp, Severe acute respiratory syndrome coronavirus 2
tagcccatctgccttgtgt

SEQ ID NO: 2300 - DNA, 19 bp, Severe acute respiratory syndrome coronavirus 2
atagcccatctgccttgtg

SEQ ID NO: 2301 - DNA, 19 bp, Severe acute respiratory syndrome coronavirus 2
ctgcacaagagtagactat

SEQ ID NO: 2302 - DNA, 19 bp, Severe acute respiratory syndrome coronavirus 2
tctgcacaagagtagacta

SEQ ID NO: 2303 - DNA, 19 bp, Severe acute respiratory syndrome coronavirus 2
ttctgcacaagagtagact

SEQ ID NO: 2304 - DNA, 19 bp, Severe acute respiratory syndrome coronavirus 2
attctgcacaagagtagac

SEQ ID NO: 2305 - DNA, 19 bp, Severe acute respiratory syndrome coronavirus 2
cattctgcacaagagtaga

SEQ ID NO: 2306 - DNA, 19 bp, Severe acute respiratory syndrome coronavirus 2
tcattctgcacaagagtag

SEQ ID NO: 2307 - DNA, 19 bp, Severe acute respiratory syndrome coronavirus 2
ttcattctgcacaagagta

SEQ ID NO: 2308 - DNA, 19 bp, Severe acute respiratory syndrome coronavirus 2
attcattctgcacaagagt

SEQ ID NO: 2309 - DNA, 19 bp, Severe acute respiratory syndrome coronavirus 2
aattcattctgcacaagag

SEQ ID NO: 2310 - DNA, 19 bp, Severe acute respiratory syndrome coronavirus 2
gaattcattctgcacaaga

SEQ ID NO: 2311 - DNA, 19 bp, Severe acute respiratory syndrome coronavirus 2
agaattcattctgcacaag

SEQ ID NO: 2312 - DNA, 19 bp, Severe acute respiratory syndrome coronavirus 2
gagaattcattctgcacaa

SEQ ID NO: 2313 - DNA, 19 bp, Severe acute respiratory syndrome coronavirus 2
cgagaattcattctgcaca

SEQ ID NO: 2314 - DNA, 19 bp, Severe acute respiratory syndrome coronavirus 2
acgagaattcattctgcac

SEQ ID NO: 2315 - DNA, 19 bp, Severe acute respiratory syndrome coronavirus 2
tacgagaattcattctgca

SEQ ID NO: 2316 - DNA, 19 bp, Severe acute respiratory syndrome coronavirus 2
gtgagattaaagttaacta

SEQ ID NO: 2317 - DNA, 19 bp, Severe acute respiratory syndrome coronavirus 2
tgtgagattaaagttaact

SEQ ID NO: 2318 - DNA, 19 bp, Severe acute respiratory syndrome coronavirus 2
atgtgagattaaagttaac

SEQ ID NO: 2319 - DNA, 19 bp, Severe acute respiratory syndrome coronavirus 2
tatgtgagattaaagttaa

SEQ ID NO: 2320 - DNA, 19 bp, Severe acute respiratory syndrome coronavirus 2
ctatgtgagattaaagtta

SEQ ID NO: 2321 - DNA, 19 bp, Severe acute respiratory syndrome coronavirus 2
gctatgtgagattaaagtt

SEQ ID NO: 2322 - DNA, 19 bp, Severe acute respiratory syndrome coronavirus 2
tgctatgtgagattaaagt

SEQ ID NO: 2323 - DNA, 19 bp, Severe acute respiratory syndrome coronavirus 2
ttgctatgtgagattaaag

SEQ ID NO: 2324 - DNA, 19 bp, Severe acute respiratory syndrome coronavirus 2
attgctatgtgagattaaa

SEQ ID NO: 2325 - DNA, 19 bp, Severe acute respiratory syndrome coronavirus 2
gattgctatgtgagattaa

SEQ ID NO: 2326 - DNA, 19 bp, Severe acute respiratory syndrome coronavirus 2
agattgctatgtgagatta

SEQ ID NO: 2327 - DNA, 19 bp, Severe acute respiratory syndrome coronavirus 2
aagattgctatgtgagatt

SEQ ID NO: 2328 - DNA, 19 bp, Severe acute respiratory syndrome coronavirus 2
aaagattgctatgtgagat

SEQ ID NO: 2329 - DNA, 19 bp, Severe acute respiratory syndrome coronavirus 2
taaagattgctatgtgaga

SEQ ID NO: 2330 - DNA, 19 bp, Severe acute respiratory syndrome coronavirus 2
ttaaagattgctatgtgag

SEQ ID NO: 2331 - DNA, 19 bp, Severe acute respiratory syndrome coronavirus 2
attaaagattgctatgtga

SEQ ID NO: 2332 - DNA, 19 bp, Severe acute respiratory syndrome coronavirus 2
gattaaagattgctatgtg

SEQ ID NO: 2333 - DNA, 19 bp, Severe acute respiratory syndrome coronavirus 2
tgattaaagattgctatgt

SEQ ID NO: 2334 - DNA, 19 bp, Severe acute respiratory syndrome coronavirus 2
tcctccctaatgttacaca

SEQ ID NO: 2335 - DNA, 19 bp, Severe acute respiratory syndrome coronavirus 2
gtcctccctaatgttacac

SEQ ID NO: 2336 - DNA, 19 bp, Severe acute respiratory syndrome coronavirus 2
agtcctccctaatgttaca

SEQ ID NO: 2337 - DNA, 19 bp, Severe acute respiratory syndrome coronavirus 2
aagtcctccctaatgttac

SEQ ID NO: 2338 - DNA, 19 bp, Severe acute respiratory syndrome coronavirus 2
caagtcctccctaatgtta

SEQ ID NO: 2339 - DNA, 19 bp, Severe acute respiratory syndrome coronavirus 2
tcaagtcctccctaatgtt

SEQ ID NO: 2340 - DNA, 19 bp, Severe acute respiratory syndrome coronavirus 2
ttcaagtcctccctaatgt

SEQ ID NO: 2341 - DNA, 19 bp, Severe acute respiratory syndrome coronavirus 2
tttcaagtcctccctaatg

SEQ ID NO: 2342 - DNA, 19 bp, Severe acute respiratory syndrome coronavirus 2
ctttcaagtcctccctaat

SEQ ID NO: 2343 - DNA, 19 bp, Severe acute respiratory syndrome coronavirus 2
tctttcaagtcctccctaa

SEQ ID NO: 2344 - DNA, 19 bp, Severe acute respiratory syndrome coronavirus 2
ctctttcaagtcctcccta

SEQ ID NO: 2345 - DNA, 19 bp, Severe acute respiratory syndrome coronavirus 2
gctctttcaagtcctccct

SEQ ID NO: 2346 - DNA, 19 bp, Severe acute respiratory syndrome coronavirus 2
ggctctttcaagtcctccc

SEQ ID NO: 2347 - DNA, 19 bp, Severe acute respiratory syndrome coronavirus 2
tggctctttcaagtcctcc

SEQ ID NO: 2348 - DNA, 19 bp, Severe acute respiratory syndrome coronavirus 2
gtggctctttcaagtcctc

SEQ ID NO: 2349 - DNA, 19 bp, Severe acute respiratory syndrome coronavirus 2
ggtggctctttcaagtcct

SEQ ID NO: 2350 - DNA, 19 bp, Severe acute respiratory syndrome coronavirus 2
tggtggctctttcaagtcc

SEQ ID NO: 2351 - DNA, 19 bp, Severe acute respiratory syndrome coronavirus 2
gtggtggctctttcaagtc

SEQ ID NO: 2352 - DNA, 19 bp, Severe acute respiratory syndrome coronavirus 2
tgtggtggctctttcaagt

SEQ ID NO: 2353 - DNA, 19 bp, Severe acute respiratory syndrome coronavirus 2
atgtggtggctctttcaag

SEQ ID NO: 2354 - DNA, 19 bp, Severe acute respiratory syndrome coronavirus 2
aatgtggtggctctttcaa

SEQ ID NO: 2355 - DNA, 19 bp, Severe acute respiratory syndrome coronavirus 2
aaatgtggtggctctttca

SEQ ID NO: 2356 - DNA, 19 bp, Severe acute respiratory syndrome coronavirus 2
aaaatgtggtggctctttc

SEQ ID NO: 2357 - DNA, 19 bp, Severe acute respiratory syndrome coronavirus 2
gaaaatgtggtggctcttt

SEQ ID NO: 2358 - DNA, 19 bp, Severe acute respiratory syndrome coronavirus 2
tgaaaatgtggtggctctt

SEQ ID NO: 2359 - DNA, 19 bp, Severe acute respiratory syndrome coronavirus 2
cgtactccgcgtggcctcg

SEQ ID NO: 2360 - DNA, 19 bp, Severe acute respiratory syndrome coronavirus 2
tcgtactccgcgtggcctc

SEQ ID NO: 2361 - DNA, 19 bp, Severe acute respiratory syndrome coronavirus 2
atcgtactccgcgtggcct

SEQ ID NO: 2362 - DNA, 19 bp, Severe acute respiratory syndrome coronavirus 2
gatcgtactccgcgtggcc

SEQ ID NO: 2363 - DNA, 19 bp, Severe acute respiratory syndrome coronavirus 2
cgatcgtactccgcgtggc

SEQ ID NO: 2364 - DNA, 19 bp, Severe acute respiratory syndrome coronavirus 2
tcgatcgtactccgcgtgg

SEQ ID NO: 2365 - DNA, 19 bp, Severe acute respiratory syndrome coronavirus 2
ctcgatcgtactccgcgtg

SEQ ID NO: 2366 - DNA, 19 bp, Severe acute respiratory syndrome coronavirus 2
ggcagctctccctagcatt

SEQ ID NO: 2367 - DNA, 19 bp, Severe acute respiratory syndrome coronavirus 2
aggcagctctccctagcat

SEQ ID NO: 2368 - DNA, 19 bp, Severe acute respiratory syndrome coronavirus 2
taggcagctctccctagca

SEQ ID NO: 2369 - DNA, 19 bp, Severe acute respiratory syndrome coronavirus 2
ataggcagctctccctagc

SEQ ID NO: 2370 - DNA, 19 bp, Severe acute respiratory syndrome coronavirus 2
tataggcagctctccctag

SEQ ID NO: 2371 - DNA, 19 bp, Severe acute respiratory syndrome coronavirus 2
atataggcagctctcccta

SEQ ID NO: 2372 - DNA, 19 bp, Severe acute respiratory syndrome coronavirus 2
catataggcagctctccct

SEQ ID NO: 2373 - DNA, 19 bp, Severe acute respiratory syndrome coronavirus 2
ccatataggcagctctccc

SEQ ID NO: 2374 - DNA, 19 bp, Severe acute respiratory syndrome coronavirus 2
tccatataggcagctctcc

SEQ ID NO: 2375 - DNA, 19 bp, Severe acute respiratory syndrome coronavirus 2
ttccatataggcagctctc

SEQ ID NO: 2376 - DNA, 19 bp, Severe acute respiratory syndrome coronavirus 2
cttccatataggcagctct

SEQ ID NO: 2377 - DNA, 19 bp, Severe acute respiratory syndrome coronavirus 2
tcttccatataggcagctc

SEQ ID NO: 2378 - DNA, 19 bp, Severe acute respiratory syndrome coronavirus 2
ctcttccatataggcagct

SEQ ID NO: 2379 - DNA, 19 bp, Severe acute respiratory syndrome coronavirus 2
gctcttccatataggcagc

SEQ ID NO: 2380 - DNA, 19 bp, Severe acute respiratory syndrome coronavirus 2
ggctcttccatataggcag

SEQ ID NO: 2381 - DNA, 19 bp, Severe acute respiratory syndrome coronavirus 2
gggctcttccatataggca

SEQ ID NO: 2382 - DNA, 19 bp, Severe acute respiratory syndrome coronavirus 2
agggctcttccatataggc

SEQ ID NO: 2383 - DNA, 19 bp, Severe acute respiratory syndrome coronavirus 2
tagggctcttccatatagg

SEQ ID NO: 2384 - DNA, 19 bp, Severe acute respiratory syndrome coronavirus 2
ttagggctcttccatatag

SEQ ID NO: 2385 - DNA, 19 bp, Severe acute respiratory syndrome coronavirus 2
attagggctcttccatata

SEQ ID NO: 2386 - DNA, 19 bp, Severe acute respiratory syndrome coronavirus 2
cattagggctcttccatat

SEQ ID NO: 2387 - DNA, 19 bp, Severe acute respiratory syndrome coronavirus 2
acattagggctcttccata

SEQ ID NO: 2388 - DNA, 19 bp, Severe acute respiratory syndrome coronavirus 2
cacattagggctcttccat

SEQ ID NO: 2389 - DNA, 19 bp, Severe acute respiratory syndrome coronavirus 2
acacattagggctcttcca

SEQ ID NO: 2390 - DNA, 19 bp, Severe acute respiratory syndrome coronavirus 2
tacacattagggctcttcc

SEQ ID NO: 2391 - DNA, 19 bp, Severe acute respiratory syndrome coronavirus 2
ttacacattagggctcttc

SEQ ID NO: 2392 - DNA, 19 bp, Severe acute respiratory syndrome coronavirus 2
tttacacattagggctctt

SEQ ID NO: 2393 - DNA, 19 bp, Severe acute respiratory syndrome coronavirus 2
ttttacacattagggctct

SEQ ID NO: 2394 - DNA, 19 bp, Severe acute respiratory syndrome coronavirus 2
attttacacattagggctc

SEQ ID NO: 2395 - DNA, 19 bp, Severe acute respiratory syndrome coronavirus 2
aattttacacattagggct

SEQ ID NO: 2396 - DNA, 19 bp, Severe acute respiratory syndrome coronavirus 2
taattttacacattagggc

SEQ ID NO: 2397 - DNA, 19 bp, Severe acute respiratory syndrome coronavirus 2
ttaattttacacattaggg

SEQ ID NO: 2398 - DNA, 19 bp, Severe acute respiratory syndrome coronavirus 2
attaattttacacattagg

SEQ ID NO: 2399 - DNA, 19 bp, Severe acute respiratory syndrome coronavirus 2
aattaattttacacattag

SEQ ID NO: 2400 - DNA, 19 bp, Severe acute respiratory syndrome coronavirus 2
aaattaattttacacatta

SEQ ID NO: 2401 - DNA, 19 bp, Severe acute respiratory syndrome coronavirus 2
aaaattaattttacacatt

SEQ ID NO: 2402 - DNA, 19 bp, Severe acute respiratory syndrome coronavirus 2
taaaattaattttacacat

SEQ ID NO: 2403 - DNA, 19 bp, Severe acute respiratory syndrome coronavirus 2
ctaaaattaattttacaca

SEQ ID NO: 2404 - DNA, 19 bp, Severe acute respiratory syndrome coronavirus 2
actaaaattaattttacac

SEQ ID NO: 2405 - DNA, 19 bp, Severe acute respiratory syndrome coronavirus 2
tactaaaattaattttaca

SEQ ID NO: 2406 - DNA, 19 bp, Severe acute respiratory syndrome coronavirus 2
ctactaaaattaattttac

SEQ ID NO: 2407 - DNA, 29903 bp, Severe acute respiratory syndrome coronavirus 2
attaaaggtttataccttcccaggtaacaaaccaaccaactttcgatctcttgtagatctgttctctaaacgaactttaaaatctgtgtggctgtcactcggctgcatgcttagtgcactcacgcagtataattaataactaattactgtcgttgacaggacacgagtaactcgtctatcttctgcaggctgcttacggtttcgtccgtgttgcagccgatcatcagcacatctaggtttcgtccgggtgtgaccgaaaggtaagatggagagccttgtccctggtttcaacgagaaaacacacgtccaactcagtttgcctgttttacaggttcgcgacgtgctcgtacgtggctttggagactccgtggaggaggtcttatcagaggcacgtcaacatcttaaagatggcacttgtggcttagtagaagttgaaaaaggcgttttgcctcaacttgaacagccctatgtgttcatcaaacgttcggatgctcgaactgcacctcatggtcatgttatggttgagctggtagcagaactcgaaggcattcagtacggtcgtagtggtgagacacttggtgtccttgtccctcatgtgggcgaaataccagtggcttaccgcaaggttcttcttcgtaagaacggtaataaaggagctggtggccatagttacggcgccgatctaaagtcatttgacttaggcgacgagcttggcactgatccttatgaagattttcaagaaaactggaacactaaacatagcagtggtgttacccgtgaactcatgcgtgagcttaacggaggggcatacactcgctatgtcgataacaacttctgtggccctgatggctaccctcttgagtgcattaaagaccttctagcacgtgctggtaaagcttcatgcactttgtccgaacaactggactttattgacactaagaggggtgtatactgctgccgtgaacatgagcatgaaattgcttggtacacggaacgttctgaaaagagctatgaattgcagacaccttttgaaattaaattggcaaagaaatttgacaccttcaatggggaatgtccaaattttgtatttcccttaaattccataatcaagactattcaaccaagggttgaaaagaaaaagcttgatggctttatgggtagaattcgatctgtctatccagttgcgtcaccaaatgaatgcaaccaaatgtgcctttcaactctcatgaagtgtgatcattgtggtgaaacttcatggcagacgggcgattttgttaaagccacttgcgaattttgtggcactgagaatttgactaaagaaggtgccactacttgtggttacttaccccaaaatgctgttgttaaaatttattgtccagcatgtcacaattcagaagtaggacctgagcatagtcttgccgaataccataatgaatctggcttgaaaaccattcttcgtaagggtggtcgcactattgcctttggaggctgtgtgttctcttatgttggttgccataacaagtgtgcctattgggttccacgtgctagcgctaacataggttgtaaccatacaggtgttgttggagaaggttccgaaggtcttaatgacaaccttcttgaaatactccaaaaagagaaagtcaacatcaatattgttggtgactttaaacttaatgaagagatcgccattattttggcatctttttctgcttccacaagtgcttttgtggaaactgtgaaaggtttggattataaagcattcaaacaaattgttgaatcctgtggtaattttaaagttacaaaaggaaaagctaaaaaaggtgcctggaatattggtgaacagaaatcaatactgagtcctctttatgcatttgcatcagaggctgctcgtgttgtacgatcaattttctcccgcactcttgaaactgctcaaaattctgtgcgtgttttacagaaggccgctataacaatactagatggaatttcacagtattcactgagactcattgatgctatgatgttcacatctgatttggctactaacaatctagttgtaatggcctacattacaggtggtgttgttcagttgacttcgcagtggctaactaacatctttggcactgtttatgaaaaactcaaacccgtccttgattggcttgaagagaagtttaaggaaggtgtagagtttcttagagacggttgggaaattgttaaatttatctcaacctgtgcttgtgaaattgtcggtggacaaattgtcacctgtgcaaaggaaattaaggagagtgttcagacattctttaagcttgtaaataaatttttggctttgtgtgctgactctatcattattggtggagctaaacttaaagccttgaatttaggtgaaacatttgtcacgcactcaaagggattgtacagaaagtgtgttaaatccagagaagaaactggcctactcatgcctctaaaagccccaaaagaaattatcttcttagagggagaaacacttcccacagaagtgttaacagaggaagttgtcttgaaaactggtgatttacaaccattagaacaacctactagtgaagctgttgaagctccattggttggtacaccagtttgtattaacgggcttatgttgctcgaaatcaaagacacagaaaagtactgtgcccttgcacctaatatgatggtaacaaacaataccttcacactcaaaggcggtgcaccaacaaaggttacttttggtgatgacactgtgatagaagtgcaaggttacaagagtgtgaatatcacttttgaacttgatgaaaggattgataaagtacttaatgagaagtgctctgcctatacagttgaactcggtacagaagtaaatgagttcgcctgtgttgtggcagatgctgtcataaaaactttgcaaccagtatctgaattacttacaccactgggcattgatttagatgagtggagtatggctacatactacttatttgatgagtctggtgagtttaaattggcttcacatatgtattgttctttctaccctccagatgaggatgaagaagaaggtgattgtgaagaagaagagtttgagccatcaactcaatatgagtatggtactgaagatgattaccaaggtaaacctttggaatttggtgccacttctgctgctcttcaacctgaagaagagcaagaagaagattggttagatgatgatagtcaacaaactgttggtcaacaagacggcagtgaggacaatcagacaactactattcaaacaattgttgaggttcaacctcaattagagatggaacttacaccagttgttcagactattgaagtgaatagttttagtggttatttaaaacttactgacaatgtatacattaaaaatgcagacattgtggaagaagctaaaaaggtaaaaccaacagtggttgttaatgcagccaatgtttaccttaaacatggaggaggtgttgcaggagccttaaataaggctactaacaatgccatgcaagttgaatctgatgattacatagctactaatggaccacttaaagtgggtggtagttgtgttttaagcggacacaatcttgctaaacactgtcttcatgttgtcggcccaaatgttaacaaaggtgaagacattcaacttcttaagagtgcttatgaaaattttaatcagcacgaagttctacttgcaccattattatcagctggtatttttggtgctgaccctatacattctttaagagtttgtgtagatactgttcgcacaaatgtctacttagctgtctttgataaaaatctctatgacaaacttgtttcaagctttttggaaatgaagagtgaaaagcaagttgaacaaaagatcgctgagattcctaaagaggaagttaagccatttataactgaaagtaaaccttcagttgaacagagaaaacaagatgataagaaaatcaaagcttgtgttgaagaagttacaacaactctggaagaaactaagttcctcacagaaaacttgttactttatattgacattaatggcaatcttcatccagattctgccactcttgttagtgacattgacatcactttcttaaagaaagatgctccatatatagtgggtgatgttgttcaagagggtgttttaactgctgtggttatacctactaaaaaggctggtggcactactgaaatgctagcgaaagctttgagaaaagtgccaacagacaattatataaccacttacccgggtcagggtttaaatggttacactgtagaggaggcaaagacagtgcttaaaaagtgtaaaagtgccttttacattctaccatctattatctctaatgagaagcaagaaattcttggaactgtttcttggaatttgcgagaaatgcttgcacatgcagaagaaacacgcaaattaatgcctgtctgtgtggaaactaaagccatagtttcaactatacagcgtaaatataagggtattaaaatacaagagggtgtggttgattatggtgctagattttacttttacaccagtaaaacaactgtagcgtcacttatcaacacacttaacgatctaaatgaaactcttgttacaatgccacttggctatgtaacacatggcttaaatttggaagaagctgctcggtatatgagatctctcaaagtgccagctacagtttctgtttcttcacctgatgctgttacagcgtataatggttatcttacttcttcttctaaaacacctgaagaacattttattgaaaccatctcacttgctggttcctataaagattggtcctattctggacaatctacacaactaggtatagaatttcttaagagaggtgataaaagtgtatattacactagtaatcctaccacattccacctagatggtgaagttatcacctttgacaatcttaagacacttctttctttgagagaagtgaggactattaaggtgtttacaacagtagacaacattaacctccacacgcaagttgtggacatgtcaatgacatatggacaacagtttggtccaacttatttggatggagctgatgttactaaaataaaacctcataattcacatgaaggtaaaacattttatgttttacctaatgatgacactctacgtgttgaggcttttgagtactaccacacaactgatcctagttttctgggtaggtacatgtcagcattaaatcacactaaaaagtggaaatacccacaagttaatggtttaacttctattaaatgggcagataacaactgttatcttgccactgcattgttaacactccaacaaatagagttgaagtttaatccacctgctctacaagatgcttattacagagcaagggctggtgaagctgctaacttttgtgcacttatcttagcctactgtaataagacagtaggtgagttaggtgatgttagagaaacaatgagttacttgtttcaacatgccaatttagattcttgcaaaagagtcttgaacgtggtgtgtaaaacttgtggacaacagcagacaacccttaagggtgtagaagctgttatgtacatgggcacactttcttatgaacaatttaagaaaggtgttcagataccttgtacgtgtggtaaacaagctacaaaatatctagtacaacaggagtcaccttttgttatgatgtcagcaccacctgctcagtatgaacttaagcatggtacatttacttgtgctagtgagtacactggtaattaccagtgtggtcactataaacatataacttctaaagaaactttgtattgcatagacggtgctttacttacaaagtcctcagaatacaaaggtcctattacggatgttttctacaaagaaaacagttacacaacaaccataaaaccagttacttataaattggatggtgttgtttgtacagaaattgaccctaagttggacaattattataagaaagacaattcttatttcacagagcaaccaattgatcttgtaccaaaccaaccatatccaaacgcaagcttcgataattttaagtttgtatgtgataatatcaaatttgctgatgatttaaaccagttaactggttataagaaacctgcttcaagagagcttaaagttacatttttccctgacttaaatggtgatgtggtggctattgattataaacactacacaccctcttttaagaaaggagctaaattgttacataaacctattgtttggcatgttaacaatgcaactaataaagccacgtataaaccaaatacctggtgtatacgttgtctttggagcacaaaaccagttgaaacatcaaattcgtttgatgtactgaagtcagaggacgcgcagggaatggataatcttgcctgcgaagatctaaaaccagtctctgaagaagtagtggaaaatcctaccatacagaaagacgttcttgagtgtaatgtgaaaactaccgaagttgtaggagacattatacttaaaccagcaaataatagtttaaaaattacagaagaggttggccacacagatctaatggctgcttatgtagacaattctagtcttactattaagaaacctaatgaattatctagagtattaggtttgaaaacccttgctactcatggtttagctgctgttaatagtgtcccttgggatactatagctaattatgctaagccttttcttaacaaagttgttagtacaactactaacatagttacacggtgtttaaaccgtgtttgtactaattatatgccttatttctttactttattgctacaattgtgtacttttactagaagtacaaattctagaattaaagcatctatgccgactactatagcaaagaatactgttaagagtgtcggtaaattttgtctagaggcttcatttaattatttgaagtcacctaatttttctaaactgataaatattataatttggtttttactattaagtgtttgcctaggttctttaatctactcaaccgctgctttaggtgttttaatgtctaatttaggcatgccttcttactgtactggttacagagaaggctatttgaactctactaatgtcactattgcaacctactgtactggttctataccttgtagtgtttgtcttagtggtttagattctttagacacctatccttctttagaaactatacaaattaccatttcatcttttaaatgggatttaactgcttttggcttagttgcagagtggtttttggcatatattcttttcactaggtttttctatgtacttggattggctgcaatcatgcaattgtttttcagctattttgcagtacattttattagtaattcttggcttatgtggttaataattaatcttgtacaaatggccccgatttcagctatggttagaatgtacatcttctttgcatcattttattatgtatggaaaagttatgtgcatgttgtagacggttgtaattcatcaacttgtatgatgtgttacaaacgtaatagagcaacaagagtcgaatgtacaactattgttaatggtgttagaaggtccttttatgtctatgctaatggaggtaaaggcttttgcaaactacacaattggaattgtgttaattgtgatacattctgtgctggtagtacatttattagtgatgaagttgcgagagacttgtcactacagtttaaaagaccaataaatcctactgaccagtcttcttacatcgttgatagtgttacagtgaagaatggttccatccatctttactttgataaagctggtcaaaagacttatgaaagacattctctctctcattttgttaacttagacaacctgagagctaataacactaaaggttcattgcctattaatgttatagtttttgatggtaaatcaaaatgtgaagaatcatctgcaaaatcagcgtctgtttactacagtcagcttatgtgtcaacctatactgttactagatcaggcattagtgtctgatgttggtgatagtgcggaagttgcagttaaaatgtttgatgcttacgttaatacgttttcatcaacttttaacgtaccaatggaaaaactcaaaacactagttgcaactgcagaagctgaacttgcaaagaatgtgtccttagacaatgtcttatctacttttatttcagcagctcggcaagggtttgttgattcagatgtagaaactaaagatgttgttgaatgtcttaaattgtcacatcaatctgacatagaagttactggcgatagttgtaataactatatgctcacctataacaaagttgaaaacatgacaccccgtgaccttggtgcttgtattgactgtagtgcgcgtcatattaatgcgcaggtagcaaaaagtcacaacattgctttgatatggaacgttaaagatttcatgtcattgtctgaacaactacgaaaacaaatacgtagtgctgctaaaaagaataacttaccttttaagttgacatgtgcaactactagacaagttgttaatgttgtaacaacaaagatagcacttaagggtggtaaaattgttaataattggttgaagcagttaattaaagttacacttgtgttcctttttgttgctgctattttctatttaataacacctgttcatgtcatgtctaaacatactgacttttcaagtgaaatcataggatacaaggctattgatggtggtgtcactcgtgacatagcatctacagatacttgttttgctaacaaacatgctgattttgacacatggtttagccagcgtggtggtagttatactaatgacaaagcttgcccattgattgctgcagtcataacaagagaagtgggttttgtcgtgcctggtttgcctggcacgatattacgcacaactaatggtgactttttgcatttcttacctagagtttttagtgcagttggtaacatctgttacacaccatcaaaacttatagagtacactgactttgcaacatcagcttgtgttttggctgctgaatgtacaatttttaaagatgcttctggtaagccagtaccatattgttatgataccaatgtactagaaggttctgttgcttatgaaagtttacgccctgacacacgttatgtgctcatggatggctctattattcaatttcctaacacctaccttgaaggttctgttagagtggtaacaacttttgattctgagtactgtaggcacggcacttgtgaaagatcagaagctggtgtttgtgtatctactagtggtagatgggtacttaacaatgattattacagatctttaccaggagttttctgtggtgtagatgctgtaaatttacttactaatatgtttacaccactaattcaacctattggtgctttggacatatcagcatctatagtagctggtggtattgtagctatcgtagtaacatgccttgcctactattttatgaggtttagaagagcttttggtgaatacagtcatgtagttgcctttaatactttactattccttatgtcattcactgtactctgtttaacaccagtttactcattcttacctggtgtttattctgttatttacttgtacttgacattttatcttactaatgatgtttcttttttagcacatattcagtggatggttatgttcacacctttagtacctttctggataacaattgcttatatcatttgtatttccacaaagcatttctattggttctttagtaattacctaaagagacgtgtagtctttaatggtgtttcctttagtacttttgaagaagctgcgctgtgcacctttttgttaaataaagaaatgtatctaaagttgcgtagtgatgtgctattacctcttacgcaatataatagatacttagctctttataataagtacaagtattttagtggagcaatggatacaactagctacagagaagctgcttgttgtcatctcgcaaaggctctcaatgacttcagtaactcaggttctgatgttctttaccaaccaccacaaacctctatcacctcagctgttttgcagagtggttttagaaaaatggcattcccatctggtaaagttgagggttgtatggtacaagtaacttgtggtacaactacacttaacggtctttggcttgatgacgtagtttactgtccaagacatgtgatctgcacctctgaagacatgcttaaccctaattatgaagatttactcattcgtaagtctaatcataatttcttggtacaggctggtaatgttcaactcagggttattggacattctatgcaaaattgtgtacttaagcttaaggttgatacagccaatcctaagacacctaagtataagtttgttcgcattcaaccaggacagactttttcagtgttagcttgttacaatggttcaccatctggtgtttaccaatgtgctatgaggcccaatttcactattaagggttcattccttaatggttcatgtggtagtgttggttttaacatagattatgactgtgtctctttttgttacatgcaccatatggaattaccaactggagttcatgctggcacagacttagaaggtaacttttatggaccttttgttgacaggcaaacagcacaagcagctggtacggacacaactattacagttaatgttttagcttggttgtacgctgctgttataaatggagacaggtggtttctcaatcgatttaccacaactcttaatgactttaaccttgtggctatgaagtacaattatgaacctctaacacaagaccatgttgacatactaggacctctttctgctcaaactggaattgccgttttagatatgtgtgcttcattaaaagaattactgcaaaatggtatgaatggacgtaccatattgggtagtgctttattagaagatgaatttacaccttttgatgttgttagacaatgctcaggtgttactttccaaagtgcagtgaaaagaacaatcaagggtacacaccactggttgttactcacaattttgacttcacttttagttttagtccagagtactcaatggtctttgttcttttttttgtatgaaaatgcctttttaccttttgctatgggtattattgctatgtctgcttttgcaatgatgtttgtcaaacataagcatgcatttctctgtttgtttttgttaccttctcttgccactgtagcttattttaatatggtctatatgcctgctagttgggtgatgcgtattatgacatggttggatatggttgatactagtttgtctggttttaagctaaaagactgtgttatgtatgcatcagctgtagtgttactaatccttatgacagcaagaactgtgtatgatgatggtgctaggagagtgtggacacttatgaatgtcttgacactcgtttataaagtttattatggtaatgctttagatcaagccatttccatgtgggctcttataatctctgttacttctaactactcaggtgtagttacaactgtcatgtttttggccagaggtattgtttttatgtgtgttgagtattgccctattttcttcataactggtaatacacttcagtgtataatgctagtttattgtttcttaggctatttttgtacttgttactttggcctcttttgtttactcaaccgctactttagactgactcttggtgtttatgattacttagtttctacacaggagtttagatatatgaattcacagggactactcccacccaagaatagcatagatgccttcaaactcaacattaaattgttgggtgttggtggcaaaccttgtatcaaagtagccactgtacagtctaaaatgtcagatgtaaagtgcacatcagtagtcttactctcagttttgcaacaactcagagtagaatcatcatctaaattgtgggctcaatgtgtccagttacacaatgacattctcttagctaaagatactactgaagcctttgaaaaaatggtttcactactttctgttttgctttccatgcagggtgctgtagacataaacaagctttgtgaagaaatgctggacaacagggcaaccttacaagctatagcctcagagtttagttcccttccatcatatgcagcttttgctactgctcaagaagcttatgagcaggctgttgctaatggtgattctgaagttgttcttaaaaagttgaagaagtctttgaatgtggctaaatctgaatttgaccgtgatgcagccatgcaacgtaagttggaaaagatggctgatcaagctatgacccaaatgtataaacaggctagatctgaggacaagagggcaaaagttactagtgctatgcagacaatgcttttcactatgcttagaaagttggataatgatgcactcaacaacattatcaacaatgcaagagatggttgtgttcccttgaacataatacctcttacaacagcagccaaactaatggttgtcataccagactataacacatataaaaatacgtgtgatggtacaacatttacttatgcatcagcattgtgggaaatccaacaggttgtagatgcagatagtaaaattgttcaacttagtgaaattagtatggacaattcacctaatttagcatggcctcttattgtaacagctttaagggccaattctgctgtcaaattacagaataatgagcttagtcctgttgcactacgacagatgtcttgtgctgccggtactacacaaactgcttgcactgatgacaatgcgttagcttactacaacacaacaaagggaggtaggtttgtacttgcactgttatccgatttacaggatttgaaatgggctagattccctaagagtgatggaactggtactatctatacagaactggaaccaccttgtaggtttgttacagacacacctaaaggtcctaaagtgaagtatttatactttattaaaggattaaacaacctaaatagaggtatggtacttggtagtttagctgccacagtacgtctacaagctggtaatgcaacagaagtgcctgccaattcaactgtattatctttctgtgcttttgctgtagatgctgctaaagcttacaaagattatctagctagtgggggacaaccaatcactaattgtgttaagatgttgtgtacacacactggtactggtcaggcaataacagttacaccggaagccaatatggatcaagaatcctttggtggtgcatcgtgttgtctgtactgccgttgccacatagatcatccaaatcctaaaggattttgtgacttaaaaggtaagtatgtacaaatacctacaacttgtgctaatgaccctgtgggttttacacttaaaaacacagtctgtaccgtctgcggtatgtggaaaggttatggctgtagttgtgatcaactccgcgaacccatgcttcagtcagctgatgcacaatcgtttttaaacgggtttgcggtgtaagtgcagcccgtcttacaccgtgcggcacaggcactagtactgatgtcgtatacagggcttttgacatctacaatgataaagtagctggttttgctaaattcctaaaaactaattgttgtcgcttccaagaaaaggacgaagatgacaatttaattgattcttactttgtagttaagagacacactttctctaactaccaacatgaagaaacaatttataatttacttaaggattgtccagctgttgctaaacatgacttctttaagtttagaatagacggtgacatggtaccacatatatcacgtcaacgtcttactaaatacacaatggcagacctcgtctatgctttaaggcattttgatgaaggtaattgtgacacattaaaagaaatacttgtcacatacaattgttgtgatgatgattatttcaataaaaaggactggtatgattttgtagaaaacccagatatattacgcgtatacgccaacttaggtgaacgtgtacgccaagctttgttaaaaacagtacaattctgtgatgccatgcgaaatgctggtattgttggtgtactgacattagataatcaagatctcaatggtaactggtatgatttcggtgatttcatacaaaccacgccaggtagtggagttcctgttgtagattcttattattcattgttaatgcctatattaaccttgaccagggctttaactgcagagtcacatgttgacactgacttaacaaagccttacattaagtgggatttgttaaaatatgacttcacggaagagaggttaaaactctttgaccgttattttaaatattgggatcagacataccacccaaattgtgttaactgtttggatgacagatgcattctgcattgtgcaaactttaatgttttattctctacagtgttcccacctacaagttttggaccactagtgagaaaaatatttgttgatggtgttccatttgtagtttcaactggataccacttcagagagctaggtgttgtacataatcaggatgtaaacttacatagctctagacttagttttaaggaattacttgtgtatgctgctgaccctgctatgcacgctgcttctggtaatctattactagataaacgcactacgtgcttttcagtagctgcacttactaacaatgttgcttttcaaactgtcaaacccggtaattttaacaaagacttctatgactttgctgtgtctaagggtttctttaaggaaggaagttctgttgaattaaaacacttcttctttgctcaggatggtaatgctgctatcagcgattatgactactatcgttataatctaccaacaatgtgtgatatcagacaactactatttgtagttgaagttgttgataagtactttgattgttacgatggtggctgtattaatgctaaccaagtcatcgtcaacaacctagacaaatcagctggttttccatttaataaatggggtaaggctagactttattatgattcaatgagttatgaggatcaagatgcacttttcgcatatacaaaacgtaatgtcatccctactataactcaaatgaatcttaagtatgccattagtgcaaagaatagagctcgcaccgtagctggtgtctctatctgtagtactatgaccaatagacagtttcatcaaaaattattgaaatcaatagccgccactagaggagctactgtagtaattggaacaagcaaattctatggtggttggcacaacatgttaaaaactgtttatagtgatgtagaaaaccctcaccttatgggttgggattatcctaaatgtgatagagccatgcctaacatgcttagaattatggcctcacttgttcttgctcgcaaacatacaacgtgttgtagcttgtcacaccgtttctatagattagctaatgagtgtgctcaagtattgagtgaaatggtcatgtgtggcggttcactatatgttaaaccaggtggaacctcatcaggagatgccacaactgcttatgctaatagtgtttttaacatttgtcaagctgtcacggccaatgttaatgcacttttatctactgatggtaacaaaattgccgataagtatgtccgcaatttacaacacagactttatgagtgtctctatagaaatagagatgttgacacagactttgtgaatgagttttacgcatatttgcgtaaacatttctcaatgatgatactctctgacgatgctgttgtgtgtttcaatagcacttatgcatctcaaggtctagtggctagcataaagaactttaagtcagttctttattatcaaaacaatgtttttatgtctgaagcaaaatgttggactgagactgaccttactaaaggacctcatgaattttgctctcaacatacaatgctagttaaacagggtgatgattatgtgtaccttccttacccagatccatcaagaatcctaggggccggctgttttgtagatgatatcgtaaaaacagatggtacacttatgattgaacggttcgtgtctttagctatagatgcttacccacttactaaacatcctaatcaggagtatgctgatgtctttcatttgtacttacaatacataagaaagctacatgatgagttaacaggacacatgttagacatgtattctgttatgcttactaatgataacacttcaaggtattgggaacctgagttttatgaggctatgtacacaccgcatacagtcttacaggctgttggggcttgtgttctttgcaattcacagacttcattaagatgtggtgcttgcatacgtagaccattcttatgttgtaaatgctgttacgaccatgtcatatcaacatcacataaattagtcttgtctgttaatccgtatgtttgcaatgctccaggttgtgatgtcacagatgtgactcaactttacttaggaggtatgagctattattgtaaatcacataaaccacccattagttttccattgtgtgctaatggacaagtttttggtttatataaaaatacatgtgttggtagcgataatgttactgactttaatgcaattgcaacatgtgactggacaaatgctggtgattacattttagctaacacctgtactgaaagactcaagctttttgcagcagaaacgctcaaagctactgaggagacatttaaactgtcttatggtattgctactgtacgtgaagtgctgtctgacagagaattacatctttcatgggaagttggtaaacctagaccaccacttaaccgaaattatgtctttactggttatcgtgtaactaaaaacagtaaagtacaaataggagagtacacctttgaaaaaggtgactatggtgatgctgttgtttaccgaggtacaacaacttacaaattaaatgttggtgattattttgtgctgacatcacatacagtaatgccattaagtgcacctacactagtgccacaagagcactatgttagaattactggcttatacccaacactcaatatctcagatgagttttctagcaatgttgcaaattatcaaaaggttggtatgcaaaagtattctacactccagggaccacctggtactggtaagagtcattttgctattggcctagctctctactacccttctgctcgcatagtgtatacagcttgctctcatgccgctgttgatgcactatgtgagaaggcattaaaatatttgcctatagataaatgtagtagaattatacctgcacgtgctcgtgtagagtgttttgataaattcaaagtgaattcaacattagaacagtatgtcttttgtactgtaaatgcattgcctgagacgacagcagatatagttgtctttgatgaaatttcaatggccacaaattatgatttgagtgttgtcaatgccagattacgtgctaagcactatgtgtacattggcgaccctgctcaattacctgcaccacgcacattgctaactaagggcacactagaaccagaatatttcaattcagtgtgtagacttatgaaaactataggtccagacatgttcctcggaacttgtcggcgttgtcctgctgaaattgttgacactgtgagtgctttggtttatgataataagcttaaagcacataaagacaaatcagctcaatgctttaaaatgttttataagggtgttatcacgcatgatgtttcatctgcaattaacaggccacaaataggcgtggtaagagaattccttacacgtaaccctgcttggagaaaagctgtctttatttcaccttataattcacagaatgctgtagcctcaaagattttgggactaccaactcaaactgttgattcatcacagggctcagaatatgactatgtcatattcactcaaaccactgaaacagctcactcttgtaatgtaaacagatttaatgttgctattaccagagcaaaagtaggcatactttgcataatgtctgatagagacctttatgacaagttgcaatttacaagtcttgaaattccacgtaggaatgtggcaactttacaagctgaaaatgtaacaggactctttaaagattgtagtaaggtaatcactgggttacatcctacacaggcacctacacacctcagtgttgacactaaattcaaaactgaaggtttatgtgttgacatacctggcatacctaaggacatgacctatagaagactcatctctatgatgggttttaaaatgaattatcaagttaatggttaccctaacatgtttatcacccgcgaagaagctataagacatgtacgtgcatggattggcttcgatgtcgaggggtgtcatgctactagagaagctgttggtaccaatttacctttacagctaggtttttctacaggtgttaacctagttgctgtacctacaggttatgttgatacacctaataatacagatttttccagagttagtgctaaaccaccgcctggagatcaatttaaacacctcataccacttatgtacaaaggacttccttggaatgtagtgcgtataaagattgtacaaatgttaagtgacacacttaaaaatctctctgacagagtcgtatttgtcttatgggcacatggctttgagttgacatctatgaagtattttgtgaaaataggacctgagcgcacctgttgtctatgtgatagacgtgccacatgcttttccactgcttcagacacttatgcctgttggcatcattctattggatttgattacgtctataatccgtttatgattgatgttcaacaatggggttttacaggtaacctacaaagcaaccatgatctgtattgtcaagtccatggtaatgcacatgtagctagttgtgatgcaatcatgactaggtgtctagctgtccacgagtgctttgttaagcgtgttgactggactattgaatatcctataattggtgatgaactgaagattaatgcggcttgtagaaaggttcaacacatggttgttaaagctgcattattagcagacaaattcccagttcttcacgacattggtaaccctaaagctattaagtgtgtacctcaagctgatgtagaatggaagttctatgatgcacagccttgtagtgacaaagcttataaaatagaagaattattctattcttatgccacacattctgacaaattcacagatggtgtatgcctattttggaattgcaatgtcgatagatatcctgctaattccattgtttgtagatttgacactagagtgctatctaaccttaacttgcctggttgtgatggtggcagtttgtatgtaaataaacatgcattccacacaccagcttttgataaaagtgcttttgttaatttaaaacaattaccatttttctattactctgacagtccatgtgagtctcatggaaaacaagtagtgtcagatatagattatgtaccactaaagtctgctacgtgtataacacgttgcaatttaggtggtgctgtctgtagacatcatgctaatgagtacagattgtatctcgatgcttataacatgatgatctcagctggctttagcttgtgggtttacaaacaatttgatacttataacctctggaacacttttacaagacttcagagtttagaaaatgtggcttttaatgttgtaaataagggacactttgatggacaacagggtgaagtaccagtttctatcattaataacactgtttacacaaaagttgatggtgttgatgtagaattgtttgaaaataaaacaacattacctgttaatgtagcatttgagctttgggctaagcgcaacattaaaccagtaccagaggtgaaaatactcaataatttgggtgtggacattgctgctaatactgtgatctgggactacaaaagagatgctccagcacatatatctactattggtgtttgttctatgactgacatagccaagaaaccaactgaaacgatttgtgcaccactcactgtcttttttgatggtagagttgatggtcaagtagacttatttagaaatgcccgtaatggtgttcttattacagaaggtagtgttaaaggtttacaaccatctgtaggtcccaaacaagctagtcttaatggagtcacattaattggagaagccgtaaaaacacagttcaattattataagaaagttgatggtgttgtccaacaattacctgaaacttactttactcagagtagaaatttacaagaatttaaacccaggagtcaaatggaaattgatttcttagaattagctatggatgaattcattgaacggtataaattagaaggctatgccttcgaacatatcgtttatggagattttagtcatagtcagttaggtggtttacatctactgattggactagctaaacgttttaaggaatcaccttttgaattagaagattttattcctatggacagtacagttaaaaactatttcataacagatgcgcaaacaggttcatctaagtgtgtgtgttctgttattgatttattacttgatgattttgttgaaataataaaatcccaagatttatctgtagtttctaaggttgtcaaagtgactattgactatacagaaatttcatttatgctttggtgtaaagatggccatgtagaaacattttacccaaaattacaatctagtcaagcgtggcaaccgggtgttgctatgcctaatctttacaaaatgcaaagaatgctattagaaaagtgtgaccttcaaaattatggtgatagtgcaacattacctaaaggcataatgatgaatgtcgcaaaatatactcaactgtgtcaatatttaaacacattaacattagctgtaccctataatatgagagttatacattttggtgctggttctgataaaggagttgcaccaggtacagctgttttaagacagtggttgcctacgggtacgctgcttgtcgattcagatcttaatgactttgtctctgatgcagattcaactttgattggtgattgtgcaactgtacatacagctaataaatgggatctcattattagtgatatgtacgaccctaagactaaaaatgttacaaaagaaaatgactctaaagagggttttttcacttacatttgtgggtttatacaacaaaagctagctcttggaggttccgtggctataaagataacagaacattcttggaatgctgatctttataagctcatgggacacttcgcatggtggacagcctttgttactaatgtgaatgcgtcatcatctgaagcatttttaattggatgtaattatcttggcaaaccacgcgaacaaatagatggttatgtcatgcatgcaaattacatattttggaggaatacaaatccaattcagttgtcttcctattctttatttgacatgagtaaatttccccttaaattaaggggtactgctgttatgtctttaaaagaaggtcaaatcaatgatatgattttatctcttcttagtaaaggtagacttataattagagaaaacaacagagttgttatttctagtgatgttcttgttaacaactaaacgaacaatgtttgtttttcttgttttattgccactagtctctagtcagtgtgttaatcttacaaccagaactcaattaccccctgcatacactaattctttcacacgtggtgtttattaccctgacaaagttttcagatcctcagttttacattcaactcaggacttgttcttacctttcttttccaatgttacttggttccatgctatacatgtctctgggaccaatggtactaagaggtttgataaccctgtcctaccatttaatgatggtgtttattttgcttccactgagaagtctaacataataagaggctggatttttggtactactttagattcgaagacccagtccctacttattgttaataacgctactaatgttgttattaaagtctgtgaatttcaattttgtaatgatccatttttgggtgtttattaccacaaaaacaacaaaagttggatggaaagtgagttcagagtttattctagtgcgaataattgcacttttgaatatgtctctcagccttttcttatggaccttgaaggaaaacagggtaatttcaaaaatcttagggaatttgtgtttaagaatattgatggttattttaaaatatattctaagcacacgcctattaatttagtgcgtgatctccctcagggtttttcggctttagaaccattggtagatttgccaataggtattaacatcactaggtttcaaactttacttgctttacatagaagttatttgactcctggtgattcttcttcaggttggacagctggtgctgcagcttattatgtgggttatcttcaacctaggacttttctattaaaatataatgaaaatggaaccattacagatgctgtagactgtgcacttgaccctctctcagaaacaaagtgtacgttgaaatccttcactgtagaaaaaggaatctatcaaacttctaactttagagtccaaccaacagaatctattgttagatttcctaatattacaaacttgtgcccttttggtgaagtttttaacgccaccagatttgcatctgtttatgcttggaacaggaagagaatcagcaactgtgttgctgattattctgtcctatataattccgcatcattttccacttttaagtgttatggagtgtctcctactaaattaaatgatctctgctttactaatgtctatgcagattcatttgtaattagaggtgatgaagtcagacaaatcgctccagggcaaactggaaagattgctgattataattataaattaccagatgattttacaggctgcgttatagcttggaattctaacaatcttgattctaaggttggtggtaattataattacctgtatagattgtttaggaagtctaatctcaaaccttttgagagagatatttcaactgaaatctatcaggccggtagcacaccttgtaatggtgttgaaggttttaattgttactttcctttacaatcatatggtttccaacccactaatggtgttggttaccaaccatacagagtagtagtactttcttttgaacttctacatgcaccagcaactgtttgtggacctaaaaagtctactaatttggttaaaaacaaatgtgtcaatttcaacttcaatggtttaacaggcacaggtgttcttactgagtctaacaaaaagtttctgcctttccaacaatttggcagagacattgctgacactactgatgctgtccgtgatccacagacacttgagattcttgacattacaccatgttcttttggtggtgtcagtgttataacaccaggaacaaatacttctaaccaggttgctgttctttatcaggatgttaactgcacagaagtccctgttgctattcatgcagatcaacttactcctacttggcgtgtttattctacaggttctaatgtttttcaaacacgtgcaggctgtttaataggggctgaacatgtcaacaactcatatgagtgtgacatacccattggtgcaggtatatgcgctagttatcagactcagactaattctcctcggcgggcacgtagtgtagctagtcaatccatcattgcctacactatgtcacttggtgcagaaaattcagttgcttactctaataactctattgccatacccacaaattttactattagtgttaccacagaaattctaccagtgtctatgaccaagacatcagtagattgtacaatgtacatttgtggtgattcaactgaatgcagcaatcttttgttgcaatatggcagtttttgtacacaattaaaccgtgctttaactggaatagctgttgaacaagacaaaaacacccaagaagtttttgcacaagtcaaacaaatttacaaaacaccaccaattaaagattttggtggttttaatttttcacaaatattaccagatccatcaaaaccaagcaagaggtcatttattgaagatctacttttcaacaaagtgacacttgcagatgctggcttcatcaaacaatatggtgattgccttggtgatattgctgctagagacctcatttgtgcacaaaagtttaacggccttactgttttgccacctttgctcacagatgaaatgattgctcaatacacttctgcactgttagcgggtacaatcacttctggttggacctttggtgcaggtgctgcattacaaataccatttgctatgcaaatggcttataggtttaatggtattggagttacacagaatgttctctatgagaaccaaaaattgattgccaaccaatttaatagtgctattggcaaaattcaagactcactttcttccacagcaagtgcacttggaaaacttcaagatgtggtcaaccaaaatgcacaagctttaaacacgcttgttaaacaacttagctccaattttggtgcaatttcaagtgttttaaatgatatcctttcacgtcttgacaaagttgaggctgaagtgcaaattgataggttgatcacaggcagacttcaaagtttgcagacatatgtgactcaacaattaattagagctgcagaaatcagagcttctgctaatcttgctgctactaaaatgtcagagtgtgtacttggacaatcaaaaagagttgatttttgtggaaagggctatcatcttatgtccttccctcagtcagcacctcatggtgtagtcttcttgcatgtgacttatgtccctgcacaagaaaagaacttcacaactgctcctgccatttgtcatgatggaaaagcacactttcctcgtgaaggtgtctttgtttcaaatggcacacactggtttgtaacacaaaggaatttttatgaaccacaaatcattactacagacaacacatttgtgtctggtaactgtgatgttgtaataggaattgtcaacaacacagtttatgatcctttgcaacctgaattagactcattcaaggaggagttagataaatattttaagaatcatacatcaccagatgttgatttaggtgacatctctggcattaatgcttcagttgtaaacattcaaaaagaaattgaccgcctcaatgaggttgccaagaatttaaatgaatctctcatcgatctccaagaacttggaaagtatgagcagtatataaaatggccatggtacatttggctaggttttatagctggcttgattgccatagtaatggtgacaattatgctttgctgtatgaccagttgctgtagttgtctcaagggctgttgttcttgtggatcctgctgcaaatttgatgaagacgactctgagccagtgctcaaaggagtcaaattacattacacataaacgaacttatggatttgtttatgagaatcttcacaattggaactgtaactttgaagcaaggtgaaatcaaggatgctactccttcagattttgttcgcgctactgcaacgataccgatacaagcctcactccctttcggatggcttattgttggcgttgcacttcttgctgtttttcagagcgcttccaaaatcataaccctcaaaaagagatggcaactagcactctccaagggtgttcactttgtttgcaacttgctgttgttgtttgtaacagtttactcacaccttttgctcgttgctgctggccttgaagccccttttctctatctttatgctttagtctacttcttgcagagtataaactttgtaagaataataatgaggctttggctttgctggaaatgccgttccaaaaacccattactttatgatgccaactattttctttgctggcatactaattgttacgactattgtataccttacaatagtgtaacttcttcaattgtcattacttcaggtgatggcacaacaagtcctatttctgaacatgactaccagattggtggttatactgaaaaatgggaatctggagtaaaagactgtgttgtattacacagttacttcacttcagactattaccagctgtactcaactcaattgagtacagacactggtgttgaacatgttaccttcttcatctacaataaaattgttgatgagcctgaagaacatgtccaaattcacacaatcgacggttcatccggagttgttaatccagtaatggaaccaatttatgatgaaccgacgacgactactagcgtgcctttgtaagcacaagctgatgagtacgaacttatgtactcattcgtttcggaagagacaggtacgttaatagttaatagcgtacttctttttcttgctttcgtggtattcttgctagttacactagccatccttactgcgcttcgattgtgtgcgtactgctgcaatattgttaacgtgagtcttgtaaaaccttctttttacgtttactctcgtgttaaaaatctgaattcttctagagttcctgatcttctggtctaaacgaactaaatattatattagtttttctgtttggaactttaattttagccatggcagattccaacggtactattaccgttgaagagcttaaaaagctccttgaacaatggaacctagtaataggtttcctattccttacatggatttgtcttctacaatttgcctatgccaacaggaataggtttttgtatataattaagttaattttcctctggctgttatggccagtaactttagcttgttttgtgcttgctgctgtttacagaataaattggatcaccggtggaattgctatcgcaatggcttgtcttgtaggcttgatgtggctcagctacttcattgcttctttcagactgtttgcgcgtacgcgttccatgtggtcattcaatccagaaactaacattcttctcaacgtgccactccatggcactattctgaccagaccgcttctagaaagtgaactcgtaatcggagctgtgatccttcgtggacatcttcgtattgctggacaccatctaggacgctgtgacatcaaggacctgcctaaagaaatcactgttgctacatcacgaacgctttcttattacaaattgggagcttcgcagcgtgtagcaggtgactcaggttttgctgcatacagtcgctacaggattggcaactataaattaaacacagaccattccagtagcagtgacaatattgctttgcttgtacagtaagtgacaacagatgtttcatctcgttgactttcaggttactatagcagagatattactaattattatgaggacttttaaagtttccatttggaatcttgattacatcataaacctcataattaaaaatttatctaagtcactaactgagaataaatattctcaattagatgaagagcaaccaatggagattgattaaacgaacatgaaaattattcttttcttggcactgataacactcgctacttgtgagctttatcactaccaagagtgtgttagaggtacaacagtacttttaaaagaaccttgctcttctggaacatacgagggcaattcaccatttcatcctctagctgataacaaatttgcactgacttgctttagcactcaatttgcttttgcttgtcctgacggcgtaaaacacgtctatcagttacgtgccagatcagtttcacctaaactgttcatcagacaagaggaagttcaagaactttactctccaatttttcttattgttgcggcaatagtgtttataacactttgcttcacactcaaaagaaagacagaatgattgaactttcattaattgacttctatttgtgctttttagcctttctgctattccttgttttaattatgcttattatcttttggttctcacttgaactgcaagatcataatgaaacttgtcacgcctaaacgaacatgaaatttcttgttttcttaggaatcatcacaactgtagctgcatttcaccaagaatgtagtttacagtcatgtactcaacatcaaccatatgtagttgatgacccgtgtcctattcacttctattctaaatggtatattagagtaggagctagaaaatcagcacctttaattgaattgtgcgtggatgaggctggttctaaatcacccattcagtacatcgatatcggtaattatacagtttcctgtttaccttttacaattaattgccaggaacctaaattgggtagtcttgtagtgcgttgttcgttctatgaagactttttagagtatcatgacgttcgtgttgttttagatttcatctaaacgaacaaactaaaatgtctgataatggaccccaaaatcagcgaaatgcaccccgcattacgtttggtggaccctcagattcaactggcagtaaccagaatggagaacgcagtggggcgcgatcaaaacaacgtcggccccaaggtttacccaataatactgcgtcttggttcaccgctctcactcaacatggcaaggaagaccttaaattccctcgaggacaaggcgttccaattaacaccaatagcagtccagatgaccaaattggctactaccgaagagctaccagacgaattcgtggtggtgacggtaaaatgaaagatctcagtccaagatggtatttctactacctaggaactgggccagaagctggacttccctatggtgctaacaaagacggcatcatatgggttgcaactgagggagccttgaatacaccaaaagatcacattggcacccgcaatcctgctaacaatgctgcaatcgtgctacaacttcctcaaggaacaacattgccaaaaggcttctacgcagaagggagcagaggcggcagtcaagcctcttctcgttcctcatcacgtagtcgcaacagttcaagaaattcaactccaggcagcagtaggggaacttctcctgctagaatggctggcaatggcggtgatgctgctcttgctttgctgctgcttgacagattgaaccagcttgagagcaaaatgtctggtaaaggccaacaacaacaaggccaaactgtcactaagaaatctgctgctgaggcttctaagaagcctcggcaaaaacgtactgccactaaagcatacaatgtaacacaagctttcggcagacgtggtccagaacaaacccaaggaaattttggggaccaggaactaatcagacaaggaactgattacaaacattggccgcaaattgcacaatttgcccccagcgcttcagcgttcttcggaatgtcgcgcattggcatggaagtcacaccttcgggaacgtggttgacctacacaggtgccatcaaattggatgacaaagatccaaatttcaaagatcaagtcattttgctgaataagcatattgacgcatacaaaacattcccaccaacagagcctaaaaaggacaaaaagaagaaggctgatgaaactcaagccttaccgcagagacagaagaaacagcaaactgtgactcttcttcctgctgcagatttggatgatttctccaaacaattgcaacaatccatgagcagtgctgactcaactcaggcctaaactcatgcagaccacacaaggcagatgggctatataaacgttttcgcttttccgtttacgatatatagtctactcttgtgcagaatgaattctcgtaactacatagcacaagtagatgtagttaactttaatctcacatagcaatctttaatcagtgtgtaacattagggaggacttgaaagagccaccacattttcaccgaggccacgcggagtacgatcgagtgtacagtgaacaatgctagggagagctgcctatatggaagagccctaatgtgtaaaattaattttagtagtgctatccccatgtgattttaatagcttcttaggagaatgacaaaaaaaaaaaaaaaaaaaaaaaaaaaaaaaaa

SEQ ID NO: 2408 - DNA, 29751 bp, Severe acute respiratory syndrome-related coronavirus
atattaggtttttacctacccaggaaaagccaaccaacctcgatctcttgtagatctgttctctaaacgaactttaaaatctgtgtagctgtcgctcggctgcatgcctagtgcacctacgcagtataaacaataataaattttactgtcgttgacaagaaacgagtaactcgtccctcttctgcagactgcttacggtttcgtccgtgttgcagtcgatcatcagcatacctaggtttcgtccgggtgtgaccgaaaggtaagatggagagccttgttcttggtgtcaacgagaaaacacacgtccaactcagtttgcctgtccttcaggttagagacgtgctagtgcgtggcttcggggactctgtggaagaggccctatcggaggcacgtgaacacctcaaaaatggcacttgtggtctagtagagctggaaaaaggcgtactgccccagcttgaacagccctatgtgttcattaaacgttctgatgccttaagcaccaatcacggccacaaggtcgttgagctggttgcagaaatggacggcattcagtacggtcgtagcggtataacactgggagtactcgtgccacatgtgggcgaaaccccaattgcataccgcaatgttcttcttcgtaagaacggtaataagggagccggtggtcatagctatggcatcgatctaaagtcttatgacttaggtgacgagcttggcactgatcccattgaagattatgaacaaaactggaacactaagcatggcagtggtgcactccgtgaactcactcgtgagctcaatggaggtgcagtcactcgctatgtcgacaacaatttctgtggcccagatgggtaccctcttgattgcatcaaagattttctcgcacgcgcgggcaagtcaatgtgcactctttccgaacaacttgattacatcgagtcgaagagaggtgtctactgctgccgtgaccatgagcatgaaattgcctggttcactgagcgctctgataagagctacgagcaccagacacccttcgaaattaagagtgccaagaaatttgacactttcaaaggggaatgcccaaagtttgtgtttcctcttaactcaaaagtcaaagtcattcaaccacgtgttgaaaagaaaaagactgagggtttcatggggcgtatacgctctgtgtaccctgttgcatctccacaggagtgtaacaatatgcacttgtctaccttgatgaaatgtaatcattgcgatgaagtttcatggcagacgtgcgactttctgaaagccacttgtgaacattgtggcactgaaaatttagttattgaaggacctactacatgtgggtacctacctactaatgctgtagtgaaaatgccatgtcctgcctgtcaagacccagagattggacctgagcatagtgttgcagattatcacaaccactcaaacattgaaactcgactccgcaagggaggtaggactagatgttttggaggctgtgtgtttgcctatgttggctgctataataagcgtgcctactgggttcctcgtgctagtgctgatattggctcaggccatactggcattactggtgacaatgtggagaccttgaatgaggatctccttgagatactgagtcgtgaacgtgttaacattaacattgttggcgattttcatttgaatgaagaggttgccatcattttggcatctttctctgcttctacaagtgcctttattgacactataaagagtcttgattacaagtctttcaaaaccattgttgagtcctgcggtaactataaagttaccaagggaaagcccgtaaaaggtgcttggaacattggacaacagagatcagttttaacaccactgtgtggttttccctcacaggctgctggtgttatcagatcaatttttgcgcgcacacttgatgcagcaaaccactcaattcctgatttgcaaagagcagctgtcaccatacttgatggtatttctgaacagtcattacgtcttgtcgacgccatggtttatacttcagacctgctcaccaacagtgtcattattatggcatatgtaactggtggtcttgtacaacagacttctcagtggttgtctaatcttttgggcactactgttgaaaaactcaggcctatctttgaatggattgaggcgaaacttagtgcaggagttgaatttctcaaggatgcttgggagattctcaaatttctcattacaggtgtttttgacatcgtcaagggtcaaatacaggttgcttcagataacatcaaggattgtgtaaaatgcttcattgatgttgttaacaaggcactcgaaatgtgcattgatcaagtcactatcgctggcgcaaagttgcgatcactcaacttaggtgaagtcttcatcgctcaaagcaagggactttaccgtcagtgtatacgtggcaaggagcagctgcaactactcatgcctcttaaggcaccaaaagaagtaacctttcttgaaggtgattcacatgacacagtacttacctctgaggaggttgttctcaagaacggtgaactcgaagcactcgagacgcccgttgatagcttcacaaatggagctatcgttggcacaccagtctgtgtaaatggcctcatgctcttagagattaaggacaaagaacaatactgcgcattgtctcctggtttactggctacaaacaatgtctttcgcttaaaagggggtgcaccaattaaaggtgtaacctttggagaagatactgtttgggaagttcaaggttacaagaatgtgagaatcacatttgagcttgatgaacgtgttgacaaagtgcttaatgaaaagtgctctgtctacactgttgaatccggtaccgaagttactgagtttgcatgtgttgtagcagaggctgttgtgaagactttacaaccagtttctgatctccttaccaacatgggtattgatcttgatgagtggagtgtagctacattctacttatttgatgatgctggtgaagaaaacttttcatcacgtatgtattgttccttttaccctccagatgaggaagaagaggacgatgcagagtgtgaggaagaagaaattgatgaaacctgtgaacatgagtacggtacagaggatgattatcaaggtctccctctggaatttggtgcctcagctgaaacagttcgagttgaggaagaagaagaggaagactggctggatgatactactgagcaatcagagattgagccagaaccagaacctacacctgaagaaccagttaatcagtttactggttatttaaaacttactgacaatgttgccattaaatgtgttgacatcgttaaggaggcacaaagtgctaatcctatggtgattgtaaatgctgctaacatacacctgaaacatggtggtggtgtagcaggtgcactcaacaaggcaaccaatggtgccatgcaaaaggagagtgatgattacattaagctaaatggccctcttacagtaggagggtcttgtttgctttctggacataatcttgctaagaagtgtctgcatgttgttggacctaacctaaatgcaggtgaggacatccagcttcttaaggcagcatatgaaaatttcaattcacaggacatcttacttgcaccattgttgtcagcaggcatatttggtgctaaaccacttcagtctttacaagtgtgcgtgcagacggttcgtacacaggtttatattgcagtcaatgacaaagctctttatgagcaggttgtcatggattatcttgataacctgaagcctagagtggaagcacctaaacaagaggagccaccaaacacagaagattccaaaactgaggagaaatctgtcgtacagaagcctgtcgatgtgaagccaaaaattaaggcctgcattgatgaggttaccacaacactggaagaaactaagtttcttaccaataagttactcttgtttgctgatatcaatggtaagctttaccatgattctcagaacatgcttagaggtgaagatatgtctttccttgagaaggatgcaccttacatggtaggtgatgttatcactagtggtgatatcacttgtgttgtaataccctccaaaaaggctggtggcactactgagatgctctcaagagctttgaagaaagtgccagttgatgagtatataaccacgtaccctggacaaggatgtgctggttatacacttgaggaagctaagactgctcttaagaaatgcaaatctgcattttatgtactaccttcagaagcacctaatgctaaggaagagattctaggaactgtatcctggaatttgagagaaatgcttgctcatgctgaagagacaagaaaattaatgcctatatgcatggatgttagagccataatggcaaccatccaacgtaagtataaaggaattaaaattcaagagggcatcgttgactatggtgtccgattcttcttttatactagtaaagagcctgtagcttctattattacgaagctgaactctctaaatgagccgcttgtcacaatgccaattggttatgtgacacatggttttaatcttgaagaggctgcgcgctgtatgcgttctcttaaagctcctgccgtagtgtcagtatcatcaccagatgctgttactacatataatggatacctcacttcgtcatcaaagacatctgaggagcactttgtagaaacagtttctttggctggctcttacagagattggtcctattcaggacagcgtacagagttaggtgttgaatttcttaagcgtggtgacaaaattgtgtaccacactctggagagccccgtcgagtttcatcttgacggtgaggttctttcacttgacaaactaaagagtctcttatccctgcgggaggttaagactataaaagtgttcacaactgtggacaacactaatctccacacacagcttgtggatatgtctatgacatatggacagcagtttggtccaacatacttggatggtgctgatgttacaaaaattaaacctcatgtaaatcatgagggtaagactttctttgtactacctagtgatgacacactacgtagtgaagctttcgagtactaccatactcttgatgagagttttcttggtaggtacatgtctgctttaaaccacacaaagaaatggaaatttcctcaagttggtggtttaacttcaattaaatgggctgataacaattgttatttgtctagtgttttattagcacttcaacagcttgaagtcaaattcaatgcaccagcacttcaagaggcttattatagagcccgtgctggtgatgctgctaacttttgtgcactcatactcgcttacagtaataaaactgttggcgagcttggtgatgtcagagaaactatgacccatcttctacagcatgctaatttggaatctgcaaagcgagttcttaatgtggtgtgtaaacattgtggtcagaaaactactaccttaacgggtgtagaagctgtgatgtatatgggtactctatcttatgataatcttaagacaggtgtttccattccatgtgtgtgtggtcgtgatgctacacaatatctagtacaacaagagtcttcttttgttatgatgtctgcaccacctgctgagtataaattacagcaaggtacattcttatgtgcgaatgagtacactggtaactatcagtgtggtcattacactcatataactgctaaggagaccctctatcgtattgacggagctcaccttacaaagatgtcagagtacaaaggaccagtgactgatgttttctacaaggaaacatcttacactacaaccatcaagcctgtgtcgtataaactcgatggagttacttacacagagattgaaccaaaattggatgggtattataaaaaggataatgcttactatacagagcagcctatagaccttgtaccaactcaaccattaccaaatgcgagttttgataatttcaaactcacatgttctaacacaaaatttgctgatgatttaaatcaaatgacaggcttcacaaagccagcttcacgagagctatctgtcacattcttcccagacttgaatggcgatgtagtggctattgactatagacactattcagcgagtttcaagaaaggtgctaaattactgcataagccaattgtttggcacattaaccaggctacaaccaagacaacgttcaaaccaaacacttggtgtttacgttgtctttggagtacaaagccagtagatacttcaaattcatttgaagttctggcagtagaagacacacaaggaatggacaatcttgcttgtgaaagtcaacaacccacctctgaagaagtagtggaaaatcctaccatacagaaggaagtcatagagtgtgacgtgaaaactaccgaagttgtaggcaatgtcatacttaaaccatcagatgaaggtgttaaagtaacacaagagttaggtcatgaggatcttatggctgcttatgtggaaaacacaagcattaccattaagaaacctaatgagctttcactagccttaggtttaaaaacaattgccactcatggtattgctgcaattaatagtgttccttggagtaaaattttggcttatgtcaaaccattcttaggacaagcagcaattacaacatcaaattgcgctaagagattagcacaacgtgtgtttaacaattatatgccttatgtgtttacattattgttccaattgtgtacttttactaaaagtaccaattctagaattagagcttcactacctacaactattgctaaaaatagtgttaagagtgttgctaaattatgtttggatgccggcattaattatgtgaagtcacccaaattttctaaattgttcacaatcgctatgtggctattgttgttaagtatttgcttaggttctctaatctgtgtaactgctgcttttggtgtactcttatctaattttggtgctccttcttattgtaatggcgttagagaattgtatcttaattcgtctaacgttactactatggatttctgtgaaggttcttttccttgcagcatttgtttaagtggattagactcccttgattcttatccagctcttgaaaccattcaggtgacgatttcatcgtacaagctagacttgacaattttaggtctggccgctgagtgggttttggcatatatgttgttcacaaaattcttttatttattaggtctttcagctataatgcaggtgttctttggctattttgctagtcatttcatcagcaattcttggctcatgtggtttatcattagtattgtacaaatggcacccgtttctgcaatggttaggatgtacatcttctttgcttctttctactacatatggaagagctatgttcatatcatggatggttgcacctcttcgacttgcatgatgtgctataagcgcaatcgtgccacacgcgttgagtgtacaactattgttaatggcatgaagagatctttctatgtctatgcaaatggaggccgtggcttctgcaagactcacaattggaattgtctcaattgtgacacattttgcactggtagtacattcattagtgatgaagttgctcgtgatttgtcactccagtttaaaagaccaatcaaccctactgaccagtcatcgtatattgttgatagtgttgctgtgaaaaatggcgcgcttcacctctactttgacaaggctggtcaaaagacctatgagagacatccgctctcccattttgtcaatttagacaatttgagagctaacaacactaaaggttcactgcctattaatgtcatagtttttgatggcaagtccaaatgcgacgagtctgcttctaagtctgcttctgtgtactacagtcagctgatgtgccaacctattctgttgcttgaccaagctcttgtatcagacgttggagatagtactgaagtttccgttaagatgtttgatgcttatgtcgacaccttttcagcaacttttagtgttcctatggaaaaacttaaggcacttgttgctacagctcacagcgagttagcaaagggtgtagctttagatggtgtcctttctacattcgtgtcagctgcccgacaaggtgttgttgataccgatgttgacacaaaggatgttattgaatgtctcaaactttcacatcactctgacttagaagtgacaggtgacagttgtaacaatttcatgctcacctataataaggttgaaaacatgacgcccagagatcttggcgcatgtattgactgtaatgcaaggcatatcaatgcccaagtagcaaaaagtcacaatgtttcactcatctggaatgtaaaagactacatgtctttatctgaacagctgcgtaaacaaattcgtagtgctgccaagaagaacaacataccttttagactaacttgtgctacaactagacaggttgtcaatgtcataactactaaaatctcactcaagggtggtaagattgttagtacttgttttaaacttatgcttaaggccacattattgtgcgttcttgctgcattggtttgttatatcgttatgccagtacatacattgtcaatccatgatggttacacaaatgaaatcattggttacaaagccattcaggatggtgtcactcgtgacatcatttctactgatgattgttttgcaaataaacatgctggttttgacgcatggtttagccagcgtggtggttcatacaaaaatgacaaaagctgccctgtagtagctgctatcattacaagagagattggtttcatagtgcctggcttaccgggtactgtgctgagagcaatcaatggtgacttcttgcattttctacctcgtgtttttagtgctgttggcaacatttgctacacaccttccaaactcattgagtatagtgattttgctacctctgcttgcgttcttgctgctgagtgtacaatttttaaggatgctatgggcaaacctgtgccatattgttatgacactaatttgctagagggttctatttcttatagtgagcttcgtccagacactcgttatgtgcttatggatggttccatcatacagtttcctaacacttacctggagggttctgttagagtagtaacaacttttgatgctgagtactgtagacatggtacatgcgaaaggtcagaagtaggtatttgcctatctaccagtggtagatgggttcttaataatgagcattacagagctctatcaggagttttctgtggtgttgatgcgatgaatctcatagctaacatctttactcctcttgtgcaacctgtgggtgctttagatgtgtctgcttcagtagtggctggtggtattattgccatattggtgacttgtgctgcctactactttatgaaattcagacgtgtttttggtgagtacaaccatgttgttgctgctaatgcacttttgtttttgatgtctttcactatactctgtctggtaccagcttacagctttctgccgggagtctactcagtcttttacttgtacttgacattctatttcaccaatgatgtttcattcttggctcaccttcaatggtttgccatgttttctcctattgtgcctttttggataacagcaatctatgtattctgtatttctctgaagcactgccattggttctttaacaactatcttaggaaaagagtcatgtttaatggagttacatttagtaccttcgaggaggctgctttgtgtacctttttgctcaacaaggaaatgtacctaaaattgcgtagcgagacactgttgccacttacacagtataacaggtatcttgctctatataacaagtacaagtatttcagtggagccttagatactaccagctatcgtgaagcagcttgctgccacttagcaaaggctctaaatgactttagcaactcaggtgctgatgttctctaccaaccaccacagacatcaatcacttctgctgttctgcagagtggttttaggaaaatggcattcccgtcaggcaaagttgaagggtgcatggtacaagtaacctgtggaactacaactcttaatggattgtggttggatgacacagtatactgtccaagacatgtcatttgcacagcagaagacatgcttaatcctaactatgaagatctgctcattcgcaaatccaaccatagctttcttgttcaggctggcaatgttcaacttcgtgttattggccattctatgcaaaattgtctgcttaggcttaaagttgatacttctaaccctaagacacccaagtataaatttgtccgtatccaacctggtcaaacattttcagttctagcatgctacaatggttcaccatctggtgtttatcagtgtgccatgagacctaatcataccattaaaggttctttccttaatggatcatgtggtagtgttggttttaacattgattatgattgcgtgtctttctgctatatgcatcatatggagcttccaacaggagtacacgctggtactgacttagaaggtaaattctatggtccatttgttgacagacaaactgcacaggctgcaggtacagacacaaccataacattaaatgttttggcatggctgtatgctgctgttatcaatggtgataggtggtttcttaatagattcaccactactttgaatgactttaaccttgtggcaatgaagtacaactatgaacctttgacacaagatcatgttgacatattgggacctctttctgctcaaacaggaattgccgtcttagatatgtgtgctgctttgaaagagctgctgcagaatggtatgaatggtcgtactatccttggtagcactattttagaagatgagtttacaccatttgatgttgttagacaatgctctggtgttaccttccaaggtaagttcaagaaaattgttaagggcactcatcattggatgcttttaactttcttgacatcactattgattcttgttcaaagtacacagtggtcactgtttttctttgtttacgagaatgctttcttgccatttactcttggtattatggcaattgctgcatgtgctatgctgcttgttaagcataagcacgcattcttgtgcttgtttctgttaccttctcttgcaacagttgcttactttaatatggtctacatgcctgctagctgggtgatgcgtatcatgacatggcttgaattggctgacactagcttgtctggttataggcttaaggattgtgttatgtatgcttcagctttagttttgcttattctcatgacagctcgcactgtttatgatgatgctgctagacgtgtttggacactgatgaatgtcattacacttgtttacaaagtctactatggtaatgctttagatcaagctatttccatgtgggccttagttatttctgtaacctctaactattctggtgtcgttacgactatcatgtttttagctagagctatagtgtttgtgtgtgttgagtattacccattgttatttattactggcaacaccttacagtgtatcatgcttgtttattgtttcttaggctattgttgctgctgctactttggccttttctgtttactcaaccgttacttcaggcttactcttggtgtttatgactacttggtctctacacaagaatttaggtatatgaactcccaggggcttttgcctcctaagagtagtattgatgctttcaagcttaacattaagttgttgggtattggaggtaaaccatgtatcaaggttgctactgtacagtctaaaatgtctgacgtaaagtgcacatctgtggtactgctctcggttcttcaacaacttagagtagagtcatcttctaaattgtgggcacaatgtgtacaactccacaatgatattcttcttgcaaaagacacaactgaagctttcgagaagatggtttctcttttgtctgttttgctatccatgcagggtgctgtagacattaataggttgtgcgaggaaatgctcgataaccgtgctactcttcaggctattgcttcagaatttagttctttaccatcatatgccgcttatgccactgcccaggaggcctatgagcaggctgtagctaatggtgattctgaagtcgttctcaaaaagttaaagaaatctttgaatgtggctaaatctgagtttgaccgtgatgctgccatgcaacgcaagttggaaaagatggcagatcaggctatgacccaaatgtacaaacaggcaagatctgaggacaagagggcaaaagtaactagtgctatgcaaacaatgctcttcactatgcttaggaagcttgataatgatgcacttaacaacattatcaacaatgcgcgtgatggttgtgttccactcaacatcataccattgactacagcagccaaactcatggttgttgtccctgattatggtacctacaagaacacttgtgatggtaacacctttacatatgcatctgcactctgggaaatccagcaagttgttgatgcggatagcaagattgttcaacttagtgaaattaacatggacaattcaccaaatttggcttggcctcttattgttacagctctaagagccaactcagctgttaaactacagaataatgaactgagtccagtagcactacgacagatgtcctgtgcggctggtaccacacaaacagcttgtactgatgacaatgcacttgcctactataacaattcgaagggaggtaggtttgtgctggcattactatcagaccaccaagatctcaaatgggctagattccctaagagtgatggtacaggtacaatttacacagaactggaaccaccttgtaggtttgttacagacacaccaaaagggcctaaagtgaaatacttgtacttcatcaaaggcttaaacaacctaaatagaggtatggtgctgggcagtttagctgctacagtacgtcttcaggctggaaatgctacagaagtacctgccaattcaactgtgctttccttctgtgcttttgcagtagaccctgctaaagcatataaggattacctagcaagtggaggacaaccaatcaccaactgtgtgaagatgttgtgtacacacactggtacaggacaggcaattactgtaacaccagaagctaacatggaccaagagtcctttggtggtgcttcatgttgtctgtattgtagatgccacattgaccatccaaatcctaaaggattctgtgacttgaaaggtaagtacgtccaaatacctaccacttgtgctaatgacccagtgggttttacacttagaaacacagtctgtaccgtctgcggaatgtggaaaggttatggctgtagttgtgaccaactccgcgaacccttgatgcagtctgcggatgcatcaacgtttttaaacgggtttgcggtgtaagtgcagcccgtcttacaccgtgcggcacaggcactagtactgatgtcgtctacagggcttttgatatttacaacgaaaaagttgctggttttgcaaagttcctaaaaactaattgctgtcgcttccaggagaaggatgaggaaggcaatttattagactcttactttgtagttaagaggcatactatgtctaactaccaacatgaagagactatttataacttggttaaagattgtccagcggttgctgtccatgactttttcaagtttagagtagatggtgacatggtaccacatatatcacgtcagcgtctaactaaatacacaatggctgatttagtctatgctctacgtcattttgatgagggtaattgtgatacattaaaagaaatactcgtcacatacaattgctgtgatgatgattatttcaataagaaggattggtatgacttcgtagagaatcctgacatcttacgcgtatatgctaacttaggtgagcgtgtacgccaatcattattaaagactgtacaattctgcgatgctatgcgtgatgcaggcattgtaggcgtactgacattagataatcaggatcttaatgggaactggtacgatttcggtgatttcgtacaagtagcaccaggctgcggagttcctattgtggattcatattactcattgctgatgcccatcctcactttgactagggcattggctgctgagtcccatatggatgctgatctcgcaaaaccacttattaagtgggatttgctgaaatatgattttacggaagagagactttgtctcttcgaccgttattttaaatattgggaccagacataccatcccaattgtattaactgtttggatgataggtgtatccttcattgtgcaaactttaatgtgttattttctactgtgtttccacctacaagttttggaccactagtaagaaaaatatttgtagatggtgttccttttgttgtttcaactggataccattttcgtgagttaggagtcgtacataatcaggatgtaaacttacatagctcgcgtctcagtttcaaggaacttttagtgtatgctgctgatccagctatgcatgcagcttctggcaatttattgctagataaacgcactacatgcttttcagtagctgcactaacaaacaatgttgcttttcaaactgtcaaacccggtaattttaataaagacttttatgactttgctgtgtctaaaggtttctttaaggaaggaagttctgttgaactaaaacacttcttctttgctcaggatggcaacgctgctatcagtgattatgactattatcgttataatctgccaacaatgtgtgatatcagacaactcctattcgtagttgaagttgttgataaatactttgattgttacgatggtggctgtattaatgccaaccaagtaatcgttaacaatctggataaatcagctggtttcccatttaataaatggggtaaggctagactttattatgactcaatgagttatgaggatcaagatgcacttttcgcgtatactaagcgtaatgtcatccctactataactcaaatgaatcttaagtatgccattagtgcaaagaatagagctcgcaccgtagctggtgtctctatctgtagtactatgacaaatagacagtttcatcagaaattattgaagtcaatagccgccactagaggagctactgtggtaattggaacaagcaagttttacggtggctggcataatatgttaaaaactgtttacagtgatgtagaaactccacaccttatgggttgggattatccaaaatgtgacagagccatgcctaacatgcttaggataatggcctctcttgttcttgctcgcaaacataacacttgctgtaacttatcacaccgtttctacaggttagctaacgagtgtgcgcaagtattaagtgagatggtcatgtgtggcggctcactatatgttaaaccaggtggaacatcatccggtgatgctacaactgcttatgctaatagtgtctttaacatttgtcaagctgttacagccaatgtaaatgcacttctttcaactgatggtaataagatagctgacaagtatgtccgcaatctacaacacaggctctatgagtgtctctatagaaatagggatgttgatcatgaattcgtggatgagttttacgcttacctgcgtaaacatttctccatgatgattctttctgatgatgccgttgtgtgctataacagtaactatgcggctcaaggtttagtagctagcattaagaactttaaggcagttctttattatcaaaataatgtgttcatgtctgaggcaaaatgttggactgagactgaccttactaaaggacctcacgaattttgctcacagcatacaatgctagttaaacaaggagatgattacgtgtacctgccttacccagatccatcaagaatattaggcgcaggctgttttgtcgatgatattgtcaaaacagatggtacacttatgattgaaaggttcgtgtcactggctattgatgcttacccacttacaaaacatcctaatcaggagtatgctgatgtctttcacttgtatttacaatacattagaaagttacatgatgagcttactggccacatgttggacatgtattccgtaatgctaactaatgataacacctcacggtactgggaacctgagttttatgaggctatgtacacaccacatacagtcttgcaggctgtaggtgcttgtgtattgtgcaattcacagacttcacttcgttgcggtgcctgtattaggagaccattcctatgttgcaagtgctgctatgaccatgtcatttcaacatcacacaaattagtgttgtctgttaatccctatgtttgcaatgccccaggttgtgatgtcactgatgtgacacaactgtatctaggaggtatgagctattattgcaagtcacataagcctcccattagttttccattatgtgctaatggtcaggtttttggtttatacaaaaacacatgtgtaggcagtgacaatgtcactgacttcaatgcgatagcaacatgtgattggactaatgctggcgattacatacttgccaacacttgtactgagagactcaagcttttcgcagcagaaacgctcaaagccactgaggaaacatttaagctgtcatatggtattgccactgtacgcgaagtactctctgacagagaattgcatctttcatgggaggttggaaaacctagaccaccattgaacagaaactatgtctttactggttaccgtgtaactaaaaatagtaaagtacagattggagagtacacctttgaaaaaggtgactatggtgatgctgttgtgtacagaggtactacgacatacaagttgaatgttggtgattactttgtgttgacatctcacactgtaatgccacttagtgcacctactctagtgccacaagagcactatgtgagaattactggcttgtacccaacactcaacatctcagatgagttttctagcaatgttgcaaattatcaaaaggtcggcatgcaaaagtactctacactccaaggaccacctggtactggtaagagtcattttgccatcggacttgctctctattacccatctgctcgcatagtgtatacggcatgctctcatgcagctgttgatgccctatgtgaaaaggcattaaaatatttgcccatagataaatgtagtagaatcatacctgcgcgtgcgcgcgtagagtgttttgataaattcaaagtgaattcaacactagaacagtatgttttctgcactgtaaatgcattgccagaaacaactgctgacattgtagtctttgatgaaatctctatggctactaattatgacttgagtgttgtcaatgctagacttcgtgcaaaacactacgtctatattggcgatcctgctcaattaccagccccccgcacattgctgactaaaggcacactagaaccagaatattttaattcagtgtgcagacttatgaaaacaataggtccagacatgttccttggaacttgtcgccgttgtcctgctgaaattgttgacactgtgagtgctttagtttatgacaataagctaaaagcacacaaggataagtcagctcaatgcttcaaaatgttctacaaaggtgttattacacatgatgtttcatctgcaatcaacagacctcaaataggcgttgtaagagaatttcttacacgcaatcctgcttggagaaaagctgtttttatctcaccttataattcacagaacgctgtagcttcaaaaatcttaggattgcctacgcagactgttgattcatcacagggttctgaatatgactatgtcatattcacacaaactactgaaacagcacactcttgtaatgtcaaccgcttcaatgtggctatcacaagggcaaaaattggcattttgtgcataatgtctgatagagatctttatgacaaactgcaatttacaagtctagaaataccacgtcgcaatgtggctacattacaagcagaaaatgtaactggactttttaaggactgtagtaagatcattactggtcttcatcctacacaggcacctacacacctcagcgttgatataaagttcaagactgaaggattatgtgttgacataccaggcataccaaaggacatgacctaccgtagactcatctctatgatgggtttcaaaatgaattaccaagtcaatggttaccctaatatgtttatcacccgcgaagaagctattcgtcacgttcgtgcgtggattggctttgatgtagagggctgtcatgcaactagagatgctgtgggtactaacctacctctccagctaggattttctacaggtgttaacttagtagctgtaccgactggttatgttgacactgaaaataacacagaattcaccagagttaatgcaaaacctccaccaggtgaccagtttaaacatcttataccactcatgtataaaggcttgccctggaatgtagtgcgtattaagatagtacaaatgctcagtgatacactgaaaggattgtcagacagagtcgtgttcgtcctttgggcgcatggctttgagcttacatcaatgaagtactttgtcaagattggacctgaaagaacgtgttgtctgtgtgacaaacgtgcaacttgcttttctacttcatcagatacttatgcctgctggaatcattctgtgggttttgactatgtctataacccatttatgattgatgttcagcagtggggctttacgggtaaccttcagagtaaccatgaccaacattgccaggtacatggaaatgcacatgtggctagttgtgatgctatcatgactagatgtttagcagtccatgagtgctttgttaagcgcgttgattggtctgttgaataccctattataggagatgaactgagggttaattctgcttgcagaaaagtacaacacatggttgtgaagtctgcattgcttgctgataagtttccagttcttcatgacattggaaatccaaaggctatcaagtgtgtgcctcaggctgaagtagaatggaagttctacgatgctcagccatgtagtgacaaagcttacaaaatagaggaactcttctattcttatgctacacatcacgataaattcactgatggtgtttgtttgttttggaattgtaacgttgatcgttacccagccaatgcaattgtgtgtaggtttgacacaagagtcttgtcaaacttgaacttaccaggctgtgatggtggtagtttgtatgtgaataagcatgcattccacactccagctttcgataaaagtgcatttactaatttaaagcaattgcctttcttttactattctgatagtccttgtgagtctcatggcaaacaagtagtgtcggatattgattatgttccactcaaatctgctacgtgtattacacgatgcaatttaggtggtgctgtttgcagacaccatgcaaatgagtaccgacagtacttggatgcatataatatgatgatttctgctggatttagcctatggatttacaaacaatttgatacttataacctgtggaatacatttaccaggttacagagtttagaaaatgtggcttataatgttgttaataaaggacactttgatggacacgccggcgaagcacctgtttccatcattaataatgctgtttacacaaaggtagatggtattgatgtggagatctttgaaaataagacaacacttcctgttaatgttgcatttgagctttgggctaagcgtaacattaaaccagtgccagagattaagatactcaataatttgggtgttgatatcgctgctaatactgtaatctgggactacaaaagagaagccccagcacatgtatctacaataggtgtctgcacaatgactgacattgccaagaaacctactgagagtgcttgttcttcacttactgtcttgtttgatggtagagtggaaggacaggtagacctttttagaaacgcccgtaatggtgttttaataacagaaggttcagtcaaaggtctaacaccttcaaagggaccagcacaagctagcgtcaatggagtcacattaattggagaatcagtaaaaacacagtttaactactttaagaaagtagacggcattattcaacagttgcctgaaacctactttactcagagcagagacttagaggattttaagcccagatcacaaatggaaactgactttctcgagctcgctatggatgaattcatacagcgatataagctcgagggctatgccttcgaacacatcgtttatggagatttcagtcatggacaacttggcggtcttcatttaatgataggcttagccaagcgctcacaagattcaccacttaaattagaggattttatccctatggacagcacagtgaaaaattacttcataacagatgcgcaaacaggttcatcaaaatgtgtgtgttctgtgattgatcttttacttgatgactttgtcgagataataaagtcacaagatttgtcagtgatttcaaaagtggtcaaggttacaattgactatgctgaaatttcattcatgctttggtgtaaggatggacatgttgaaaccttctacccaaaactacaagcaagtcaagcgtggcaaccaggtgttgcgatgcctaacttgtacaagatgcaaagaatgcttcttgaaaagtgtgaccttcagaattatggtgaaaatgctgttataccaaaaggaataatgatgaatgtcgcaaagtatactcaactgtgtcaatacttaaatacacttactttagctgtaccctacaacatgagagttattcactttggtgctggctctgataaaggagttgcaccaggtacagctgtgctcagacaatggttgccaactggcacactacttgtcgattcagatcttaatgacttcgtctccgacgcagattctactttaattggagactgtgcaacagtacatacggctaataaatgggaccttattattagcgatatgtatgaccctaggaccaaacatgtgacaaaagagaatgactctaaagaagggtttttcacttatctgtgtggatttataaagcaaaaactagccctgggtggttctatagctgtaaagataacagagcattcttggaatgctgacctttacaagcttatgggccatttctcatggtggacagcttttgttacaaatgtaaatgcatcatcatcggaagcatttttaattggggctaactatcttggcaagccgaaggaacaaattgatggctataccatgcatgctaactacattttctggaggaacacaaatcctatccagttgtcttcctattcactctttgacatgagcaaatttcctcttaaattaagaggaactgctgtaatgtctcttaaggagaatcaaatcaatgatatgatttattctcttctggaaaaaggtaggcttatcattagagaaaacaacagagttgtggtttcaagtgatattcttgttaacaactaaacgaacatgtttattttcttattatttcttactctcactagtggtagtgaccttgaccggtgcaccacttttgatgatgttcaagctcctaattacactcaacatacttcatctatgaggggggtttactatcctgatgaaatttttagatcagacactctttatttaactcaggatttatttcttccattttattctaatgttacagggtttcatactattaatcatacgtttggcaaccctgtcataccttttaaggatggtatttattttgctgccacagagaaatcaaatgttgtccgtggttgggtttttggttctaccatgaacaacaagtcacagtcggtgattattattaacaattctactaatgttgttatacgagcatgtaactttgaattgtgtgacaaccctttctttgctgtttctaaacccatgggtacacagacacatactatgatattcgataatgcatttaattgcactttcgagtacatatctgatgccttttcgcttgatgtttcagaaaagtcaggtaattttaaacacttacgagagtttgtgtttaaaaataaagatgggtttctctatgtttataagggctatcaacctatagatgtagttcgtgatctaccttctggttttaacactttgaaacctatttttaagttgcctcttggtattaacattacaaattttagagccattcttacagccttttcacctgctcaagacatttggggcacgtcagctgcagcctattttgttggctatttaaagccaactacatttatgctcaagtatgatgaaaatggtacaatcacagatgctgttgattgttctcaaaatccacttgctgaactcaaatgctctgttaagagctttgagattgacaaaggaatttaccagacctctaatttcagggttgttccctcaggagatgttgtgagattccctaatattacaaacttgtgtccttttggagaggtttttaatgctactaaattcccttctgtctatgcatgggagagaaaaaaaatttctaattgtgttgctgattactctgtgctctacaactcaacatttttttcaacctttaagtgctatggcgtttctgccactaagttgaatgatctttgcttctccaatgtctatgcagattcttttgtagtcaagggagatgatgtaagacaaatagcgccaggacaaactggtgttattgctgattataattataaattgccagatgatttcatgggttgtgtccttgcttggaatactaggaacattgatgctacttcaactggtaattataattataaatataggtatcttagacatggcaagcttaggccctttgagagagacatatctaatgtgcctttctcccctgatggcaaaccttgcaccccacctgctcttaattgttattggccattaaatgattatggtttttacaccactactggcattggctaccaaccttacagagttgtagtactttcttttgaacttttaaatgcaccggccacggtttgtggaccaaaattatccactgaccttattaagaaccagtgtgtcaattttaattttaatggactcactggtactggtgtgttaactccttcttcaaagagatttcaaccatttcaacaatttggccgtgatgtttctgatttcactgattccgttcgagatcctaaaacatctgaaatattagacatttcaccttgcgcttttgggggtgtaagtgtaattacacctggaacaaatgcttcatctgaagttgctgttctatatcaagatgttaactgcactgatgtttctacagcaattcatgcagatcaactcacaccagcttggcgcatatattctactggaaacaatgtattccagactcaagcaggctgtcttataggagctgagcatgtcgacacttcttatgagtgcgacattcctattggagctggcatttgtgctagttaccatacagtttctttattacgtagtactagccaaaaatctattgtggcttatactatgtctttaggtgctgatagttcaattgcttactctaataacaccattgctatacctactaacttttcaattagcattactacagaagtaatgcctgtttctatggctaaaacctccgtagattgtaatatgtacatctgcggagattctactgaatgtgctaatttgcttctccaatatggtagcttttgcacacaactaaatcgtgcactctcaggtattgctgctgaacaggatcgcaacacacgtgaagtgttcgctcaagtcaaacaaatgtacaaaaccccaactttgaaatattttggtggttttaatttttcacaaatattacctgaccctctaaagccaactaagaggtcttttattgaggacttgctctttaataaggtgacactcgctgatgctggcttcatgaagcaatatggcgaatgcctaggtgatattaatgctagagatctcatttgtgcgcagaagttcaatggacttacagtgttgccacctctgctcactgatgatatgattgctgcctacactgctgctctagttagtggtactgccactgctggatggacatttggtgctggcgctgctcttcaaataccttttgctatgcaaatggcatataggttcaatggcattggagttacccaaaatgttctctatgagaaccaaaaacaaatcgccaaccaatttaacaaggcgattagtcaaattcaagaatcacttacaacaacatcaactgcattgggcaagctgcaagacgttgttaaccagaatgctcaagcattaaacacacttgttaaacaacttagctctaattttggtgcaatttcaagtgtgctaaatgatatcctttcgcgacttgataaagtcgaggcggaggtacaaattgacaggttaattacaggcagacttcaaagccttcaaacctatgtaacacaacaactaatcagggctgctgaaatcagggcttctgctaatcttgctgctactaaaatgtctgagtgtgttcttggacaatcaaaaagagttgacttttgtggaaagggctaccaccttatgtccttcccacaagcagccccgcatggtgttgtcttcctacatgtcacgtatgtgccatcccaggagaggaacttcaccacagcgccagcaatttgtcatgaaggcaaagcatacttccctcgtgaaggtgtttttgtgtttaatggcacttcttggtttattacacagaggaacttcttttctccacaaataattactacagacaatacatttgtctcaggaaattgtgatgtcgttattggcatcattaacaacacagtttatgatcctctgcaacctgagcttgactcattcaaagaagagctggacaagtacttcaaaaatcatacatcaccagatgttgatcttggcgacatttcaggcattaacgcttctgtcgtcaacattcaaaaagaaattgaccgcctcaatgaggtcgctaaaaatttaaatgaatcactcattgaccttcaagaattgggaaaatatgagcaatatattaaatggccttggtatgtttggctcggcttcattgctggactaattgccatcgtcatggttacaatcttgctttgttgcatgactagttgttgcagttgcctcaagggtgcatgctcttgtggttcttgctgcaagtttgatgaggatgactctgagccagttctcaagggtgtcaaattacattacacataaacgaacttatggatttgtttatgagattttttactcttagatcaattactgcacagccagtaaaaattgacaatgcttctcctgcaagtactgttcatgctacagcaacgataccgctacaagcctcactccctttcggatggcttgttattggcgttgcatttcttgctgtttttcagagcgctaccaaaataattgcgctcaataaaagatggcagctagccctttataagggcttccagttcatttgcaatttactgctgctatttgttaccatctattcacatcttttgcttgtcgctgcaggtatggaggcgcaatttttgtacctctatgccttgatatattttctacaatgcatcaacgcatgtagaattattatgagatgttggctttgttggaagtgcaaatccaagaacccattactttatgatgccaactactttgtttgctggcacacacataactatgactactgtataccatataacagtgtcacagatacaattgtcgttactgaaggtgacggcatttcaacaccaaaactcaaagaagactaccaaattggtggttattctgaggataggcactcaggtgttaaagactatgtcgttgtacatggctatttcaccgaagtttactaccagcttgagtctacacaaattactacagacactggtattgaaaatgctacattcttcatctttaacaagcttgttaaagacccaccgaatgtgcaaatacacacaatcgacggctcttcaggagttgctaatccagcaatggatccaatttatgatgagccgacgacgactactagcgtgcctttgtaagcacaagaaagtgagtacgaacttatgtactcattcgtttcggaagaaacaggtacgttaatagttaatagcgtacttctttttcttgctttcgtggtattcttgctagtcacactagccatccttactgcgcttcgattgtgtgcgtactgctgcaatattgttaacgtgagtttagtaaaaccaacggtttacgtctactcgcgtgttaaaaatctgaactcttctgaaggagttcctgatcttctggtctaaacgaactaactattattattattctgtttggaactttaacattgcttatcatggcagacaacggtactattaccgttgaggagcttaaacaactcctggaacaatggaacctagtaataggtttcctattcctagcctggattatgttactacaatttgcctattctaatcggaacaggtttttgtacataataaagcttgttttcctctggctcttgtggccagtaacacttgcttgttttgtgcttgctgctgtctacagaattaattgggtgactggcgggattgcgattgcaatggcttgtattgtaggcttgatgtggcttagctacttcgttgcttccttcaggctgtttgctcgtacccgctcaatgtggtcattcaacccagaaacaaacattcttctcaatgtgcctctccgggggacaattgtgaccagaccgctcatggaaagtgaacttgtcattggtgctgtgatcattcgtggtcacttgcgaatggccggacactccctagggcgctgtgacattaaggacctgccaaaagagatcactgtggctacatcacgaacgctttcttattacaaattaggagcgtcgcagcgtgtaggcactgattcaggttttgctgcatacaaccgctaccgtattggaaactataaattaaatacagaccacgccggtagcaacgacaatattgctttgctagtacagtaagtgacaacagatgtttcatcttgttgacttccaggttacaatagcagagatattgattatcattatgaggactttcaggattgctatttggaatcttgacgttataataagttcaatagtgagacaattatttaagcctctaactaagaagaattattcggagttagatgatgaagaacctatggagttagattatccataaaacgaacatgaaaattattctcttcctgacattgattgtatttacatcttgcgagctatatcactatcaggagtgtgttagaggtacgactgtactactaaaagaaccttgcccatcaggaacatacgagggcaattcaccatttcaccctcttgctgacaataaatttgcactaacttgcactagcacacactttgcttttgcttgtgctgacggtactcgacatacctatcagctgcgtgcaagatcagtttcaccaaaacttttcatcagacaagaggaggttcaacaagagctctactcgccactttttctcattgttgctgctctagtatttttaatactttgcttcaccattaagagaaagacagaatgaatgagctcactttaattgacttctatttgtgctttttagcctttctgctattccttgttttaataatgcttattatattttggttttcactcgaaatccaggatctagaagaaccttgtaccaaagtctaaacgaacatgaaacttctcattgttttgacttgtatttctctatgcagttgcatatgcactgtagtacagcgctgtgcatctaataaacctcatgtgcttgaagatccttgtaaggtacaacactaggggtaatacttatagcactgcttggctttgtgctctaggaaaggttttaccttttcatagatggcacactatggttcaaacatgcacacctaatgttactatcaactgtcaagatccagctggtggtgcgcttatagctaggtgttggtaccttcatgaaggtcaccaaactgctgcatttagagacgtacttgttgttttaaataaacgaacaaattaaaatgtctgataatggaccccaatcaaaccaacgtagtgccccccgcattacatttggtggacccacagattcaactgacaataaccagaatggaggacgcaatggggcaaggccaaaacagcgccgaccccaaggtttacccaataatactgcgtcttggttcacagctctcactcagcatggcaaggaggaacttagattccctcgaggccagggcgttccaatcaacaccaatagtggtccagatgaccaaattggctactaccgaagagctacccgacgagttcgtggtggtgacggcaaaatgaaagagctcagccccagatggtacttctattacctaggaactggcccagaagcttcacttccctacggcgctaacaaagaaggcatcgtatgggttgcaactgagggagccttgaatacacccaaagaccacattggcacccgcaatcctaataacaatgctgccaccgtgctacaacttcctcaaggaacaacattgccaaaaggcttctacgcagagggaagcagaggcggcagtcaagcctcttctcgctcctcatcacgtagtcgcggtaattcaagaaattcaactcctggcagcagtaggggaaattctcctgctcgaatggctagcggaggtggtgaaactgccctcgcgctattgctgctagacagattgaaccagcttgagagcaaagtttctggtaaaggccaacaacaacaaggccaaactgtcactaagaaatctgctgctgaggcatctaaaaagcctcgccaaaaacgtactgccacaaaacagtacaacgtcactcaagcatttgggagacgtggtccagaacaaacccaaggaaatttcggggaccaagacctaatcagacaaggaactgattacaaacattggccgcaaattgcacaatttgctccaagtgcctctgcattctttggaatgtcacgcattggcatggaagtcacaccttcgggaacatggctgacttatcatggagccattaaattggatgacaaagatccacaattcaaagacaacgtcatactgctgaacaagcacattgacgcatacaaaacattcccaccaacagagcctaaaaaggacaaaaagaaaaagactgatgaagctcagcctttgccgcagagacaaaagaagcagcccactgtgactcttcttcctgcggctgacatggatgatttctccagacaacttcaaaattccatgagtggagcttctgctgattcaactcaggcataaacactcatgatgaccacacaaggcagatgggctatgtaaacgttttcgcaattccgtttacgatacatagtctactcttgtgcagaatgaattctcgtaactaaacagcacaagtaggtttagttaactttaatctcacatagcaatctttaatcaatgtgtaacattagggaggacttgaaagagccaccacattttcatcgaggccacgcggagtacgatcgagggtacagtgaataatgctagggagagctgcctatatggaagagccctaatgtgtaaaattaattttagtagtgctatccccatgtgattttaatagcttcttaggagaatgacaaaaaaaaaaaaaaaaaaaaaaaa

SEQ ID NO: 2409 - DNA, 30119 bp, Middle East respiratory syndrome-related coronavirus
gatttaagtgaatagcttggctatctcacttcccctcgttctcttgcagaactttgattttaacgaacttaaataaaagccctgttgtttagcgtatcgttgcacttgtctggtgggattgtggcattaatttgcctgctcatctaggcagtggacatatgctcaacactgggtataattctaattgaatactatttttcagttagagcgtcgtgtctcttgtacgtctcggtcacaatacacggtttcgtccggtgcgtggcaattcggggcacatcatgtctttcgtggctggtgtgaccgcgcaaggtgcgcgcggtacgtatcgagcagcgctcaactctgaaaaacatcaagaccatgtgtctctaactgtgccactctgtggttcaggaaacctggttgaaaaactttcaccatggttcatggatggcgaaaatgcctatgaagtggtgaaggccatgttacttaaaaaggagccacttctctatgtgcccatccggctggctggacacactagacacctcccaggtcctcgtgtgtacctggttgagaggctcattgcttgtgaaaatccattcatggttaaccaattggcttatagctctagtgcaaatggcagcctggttggcacaactttgcagggcaagcctattggtatgttcttcccttatgacatcgaacttgtcacaggaaagcaaaatattctcctgcgcaagtatggccgtggtggttatcactacaccccattccactatgagcgagacaacacctcttgccctgagtggatggacgattttgaggcggatcctaaaggcaaatatgcccagaatctgcttaagaagttgattggcggtgatgtcactccagttgaccaatacatgtgtggcgttgatggaaaacccattagtgcctacgcatttttaatggccaaggatggaataaccaaactggctgatgttgaagcggacgtcgcagcacgtgctgatgacgaaggcttcatcacattaaagaacaatctatatagattggtttggcatgttgagcgtaaagacgttccatatcctaagcaatctatttttactattaatagtgtggtccaaaaggatggtgttgaaaacactcctcctcactattttactcttggatgcaaaattttaacgctcaccccacgcaacaagtggagtggcgtttctgacttgtccctcaaacaaaaactcctttacaccttctatggtaaggagtcacttgagaacccaacctacatttaccactccgcattcattgagtgtggaagttgtggtaatgattcctggcttacagggaatgctatccaagggtttgcctgtggatgtggggcatcatatacagctaatgatgtcgaagtccaatcatctggcatgattaagccaaatgctcttctttgtgctacttgcccctttgctaagggtgatagctgttcttctaattgcaaacattcagttgctcagttggttagttacctttctgaacgctgtaatgttattgctgattctaagtccttcacacttatctttggtggcgtagcttacgcctactttggatgtgaggaaggtactatgtactttgtgcctagagctaagtctgttgtctcaaggattggagactccatctttacaggctgtactggctcttggaacaaggtcactcaaattgctaacatgttcttggaacagactcagcattcccttaactttgtgggagagttcgttgtcaacgatgttgtcctcgcaattctctctggaaccacaactaatgttgacaaaatacgccagcttctcaaaggtgtcacccttgacaagttgcgtgattatttagctgactatgacgtagcagtcactgccggcccattcatggataatgctattaatgttggtggtacaggattacagtatgccgccattactgcaccttatgtagttctcactggcttaggtgagtcctttaagaaagttgcaaccataccgtataaggtttgcaactctgttaaggatactctggcttattatgctcacagcgtgttgtacagagtttttccttatgacatggattctggtgtgtcatcctttagtgaactactttttgattgcgttgatctttcagtagcttctacctattttttagtccgcatcttgcaagataagactggcgactttatgtctacaattattacttcctgccaaactgctgttagtaagcttctagatacatgttttgaagctacagaagcaacatttaacttcttgttagatttggcaggattgttcagaatctttctccgcaatgcctatgtgtacacttcacaagggtttgtggtggtcaatggcaaagtttctacacttgtcaaacaagtgttagacttgcttaataagggtatgcaacttttgcatacaaaggtctcctgggctggttctaaaatcattgctgttatctacagcggcagggagtctctaatattcccatcgggaacctattactgtgtcaccactaaggctaagtccgttcaacaagatcttgacgttattttgcctggtgagttttccaagaagcagttaggactgctccaacctactgacaattctacaactgttagtgttactgtatccagtaacatggttgaaactgttgtgggtcaacttgagcaaactaatatgcatagtcctgatgttatagtaggtgactatgtcattattagtgaaaaattgtttgtgcgtagtaaggaagaagacggatttgccttctaccctgcttgcactaatggtcatgctgtaccgactctctttagacttaagggaggtgcacctgtaaaaaaagtagcctttggcggtgatcaagtacatgaggttgctgctgtaagaagtgttactgtcgagtacaacattcatgctgtattagacacactacttgcttcttctagtcttagaacctttgttgtagataagtctttgtcaattgaggagtttgctgacgtagtaaaggaacaagtctcagacttgcttgttaaattactgcgtggaatgccgattccagattttgatttagacgattttattgacgcaccatgctattgctttaacgctgagggtgatgcatcctggtcttctactatgatcttctctcttcaccccgtcgagtgtgacgaggagtgttctgaagtagaggcttcagatttagaagaaggtgaatcagagtgcatttctgagacttcaactgaacaagttgacgtttctcatgagacttctgacgacgagtgggctgctgcagttgatgaagcgttccctctcgatgaagcagaagatgttactgaatctgtgcaagaagaagcacaaccagtagaagtacctgttgaagatattgcgcaggttgtcatagctgacaccttacaggaaactcctgttgtgcctgatactgttgaagtcccaccgcaagtggtgaaacttccgtctgcacctcagactatccagcccgaggtaaaagaagttgcacctgtctatgaggctgataccgaacagacacagaatgttactgttaaacctaagaggttacgcaaaaagcgtaatgttgaccctttgtccaattttgaacataaggttattacagagtgcgttaccatagttttaggtgacgcaattcaagtagccaagtgctatggggagtctgtgttagttaatgctgctaacacacatcttaagcatggcggtggtatcgctggtgctattaatgcggcttcaaaaggggctgtccaaaaagagtcagatgagtatattctggctaaagggccgttacaagtaggagattcagttctcttgcaaggccattctctagctaagaatatcctgcatgtcgtaggcccagatgcccgcgctaaacaggatgtttctctccttagtaagtgctataaggctatgaatgcatatcctcttgtagtcactcctcttgtttcagcaggcatatttggtgtaaaaccagctgtgtcttttgattatcttattagggaggctaagactagagttttagtcgtcgttaattcccaagatgtctataagagtcttaccatagttgacattccacagagtttgactttttcatatgatgggttacgtggcgcaatacgtaaagctaaagattatggttttactgtttttgtgtgcacagacaactctgctaacactaaagttcttaggaacaagggtgttgattatactaagaagtttcttacagttgacggtgtgcaatattattgctacacgtctaaggacactttagatgatatcttacaacaggctaataagtctgttggtattatatctatgcctttgggatatgtgtctcatggtttagacttaatgcaagcagggagtgtcgtgcgtagagttaacgtgccctacgtgtgtctcctagctaataaagagcaagaagctattttgatgtctgaagacgttaagttaaacccttcagaagattttataaagcacgtccgcactaatggtggttacaattcttggcatttagtcgagggtgaactattggtgcaagacttacgcttaaataagctcctgcattggtctgatcaaaccatatgctacaaggatagtgtgttttatgttgtaaagaatagtacagcttttccatttgaaacactttcagcatgtcgtgcgtatttggattcacgcacgacacagcagttaacaatcgaagtcttagtgactgtcgatggtgtaaattttagaacagtcgttctaaataataagaacacttatagatcacagcttggatgcgttttctttaatggtgctgatatttctgacaccattcctgatgagaaacagaatggtcacagtttatatctagcagacaatttgactgctgatgaaacaaaggcgcttaaagagttatatggccccgttgatcctactttcttacacagattctattcacttaaggctgcagtccatgggtggaagatggttgtgtgtgataaggtacgttctctcaaattgagtgataataattgttatcttaatgcagttattatgacacttgatttattgaaggacattaaatttgttatacctgctctacagcatgcatttatgaaacataagggcggtgattcaactgacttcatagccctcattatggcttatggcaattgcacatttggtgctccagatgatgcctctcggttacttcataccgtgcttgcaaaggctgagttatgctgttctgcacgcatggtttggagagagtggtgcaatgtctgtggcataaaagatgttgttctacaaggcttaaaagcttgttgttacgtgggtgtgcaaactgttgaagatctgcgtgctcgcatgacatatgtatgccagtgtggtggtgaacgtcatcggcaattagtcgaacacaccaccccctggttgctgctctcaggcacaccaaatgaaaaattggtgacaacctccacggcgcctgattttgtagcatttaatgtctttcagggcattgaaacggctgttggccattatgttcatgctcgcctgaagggtggtcttattttaaagtttgactctggcaccgttagcaagacttcagactggaagtgcaaggtgacagatgtacttttccccggccaaaaatacagtagcgattgtaatgtcgtacggtattctttggacggtaatttcagaacagaggttgatcccgacctatctgctttctatgttaaggatggtaaatactttacaagtgaaccacccgtaacatattcaccagctacaattttagctggtagtgtctacactaatagctgccttgtatcgtctgatggacaacctggcggtgatgctattagtttgagttttaataaccttttagggtttgattctagtaaaccagtcactaagaaatacacttactccttcttgcctaaagaagacggcgatgtgttgttggctgagtttgacacttatgaccctatttataagaatggtgccatgtataaaggcaaaccaattctttgggtcaataaagcatcttatgatactaatcttaataagttcaatagagctagtttgcgtcaaatttttgacgtagcccccattgaactcgaaaataaattcacacctttgagtgtggagtctacaccagttgaacctccaactgtagatgtggtagcacttcaacaggaaatgacaattgtcaaatgtaagggtttaaataaacctttcgtgaaggacaatgtcagtttcgttgctgatgattcaggtactcccgttgttgagtatctgtctaaagaagacctacatacattgtatgtagaccctaagtatcaagtcattgtcttaaaagacaatgtactttcttctatgcttagattgcacaccgttgagtcaggtgatattaacgttgttgcagcttccggatctttgacacgtaaagtgaagttactatttagggcttcattttatttcaaagaatttgctacccgcactttcactgctaccactgctgtaggtagttgtataaagagtgtagtgcggcatctaggtgttactaaaggcatattgacaggctgttttagttttgccaagatgttatttatgcttccactagcttactttagtgattcaaaactcggcaccacagaggttaaagtgagtgctttgaaaacagccggcgttgtgacaggtaatgttgtaaaacagtgttgcactgctgctgttgatttaagtatggataagttgcgccgtgtggattggaaatcaaccctacggttgttacttatgttatgcacaactatggtattgttgtcttctgtgtatcacttgtatgtcttcaatcaggtcttatcaagtgatgttatgtttgaagatgcccaaggtttgaaaaagttctacaaagaagttagagcttacctaggaatctcttctgcttgtgacggtcttgcttcagcttatagggcgaattcctttgatgtacctacattctgcgcaaaccgttctgcaatgtgtaattggtgcttgattagccaagattccataactcactacccagctcttaagatggttcaaacacatcttagccactatgttcttaacatagattggttgtggtttgcatttgagactggtttggcatacatgctctatacctcggccttcaactggttgttgttggcaggtacattgcattatttctttgcacagacttccatatttgtagactggcggtcatacaattatgctgtgtctagtgccttctggttattcacccacattccaatggcgggtttggtacgaatgtataatttgttagcatgcctttggcttttacgcaagttttatcagcatgtaatcaatggttgcaaagatacggcatgcttgctctgctataagaggaaccgacttactagagttgaagcttctaccgttgtctgtggtggaaaacgtacgttttatatcacagcaaatggcggtatttcattctgtcgtaggcataattggaattgtgtggattgtgacactgcaggtgtggggaataccttcatctgtgaagaagtcgcaaatgacctcactaccgccctacgcaggcctattaacgctacggatagatcacattattatgtggattccgttacagttaaagagactgttgttcagtttaattatcgtagagacggtcaaccattctacgagcggtttcccctctgcgcttttacaaatctagataagttgaagttcaaagaggtctgtaaaactactactggtatacctgaatacaactttatcatctacgactcatcagatcgtggccaggaaagtttagctaggtctgcatgtgtttattattctcaagtcttgtgtaaatcaattcttttggttgactcaagtttggttacttctgttggtgattctagtgaaatcgccactaaaatgtttgattcctttgttaatagtttcgtctcgctgtataatgtcacacgcgataagttggaaaaacttatctctactgctcgtgatggcgtaaggcgaggcgataacttccatagtgtcttaacaacattcattgacgcagcacgaggccccgcaggtgtggagtctgatgttgagaccaatgaaattgttgactctgtgcagtatgctcataaacatgacatacaaattactaatgagagctacaataattatgtaccctcatatgttaaacctgatagtgtgtctaccagcgatttaggtagtctcattgattgtaatgcggcttcagttaaccaaattgtcttgcgtaattctaatggtgcttgcatttggaacgctgctgcatatatgaaactctcggatgcacttaaacgacagattcgcattgcatgccgtaagtgtaatttagctttccggttaaccacctcaaagctacgcgctaatgataatatcttatcagttagattcactgctaacaaaattgttggtggtgctcctacatggtttaatgcgttgcgtgactttacgttaaagggttatgttcttgctaccattattgtgtttctgtgtgctgtactgatgtatttgtgtttacctacattttctatggcacctgttgaattttatgaagaccgcatcttggactttaaagttcttgataatggtatcattagggatgtaaatcctgatgataagtgctttgctaataagcaccggtccttcacacaatggtatcatgagcatgttggtggtgtctatgacaactctatcacatgcccattgacagttgcagtaattgctggagttgctggtgctcgcattccagacgtacctactacattggcttgggtgaacaatcagataattttctttgtttctcgagtctttgctaatacaggcagtgtttgctacactcctatagatgagataccctataagagtttctctgatagtggttgcattcttccatctgagtgcactatgtttagggatgcagagggccgtatgacaccatactgccatgatcctactgttttgcctggggcttttgcgtacagtcagatgaggcctcatgttcgttacgacttgtatgatggtaacatgtttattaaatttcctgaagtagtatttgaaagtacacttaggattactagaactctgtcaactcagtactgccggttcggtagttgtgagtatgcacaagagggtgtttgtattaccacaaatggctcgtgggccatttttaatgaccaccatcttaatagacctggtgtctattgtggctctgattttattgacattgtcaggcggttagcagtatcactgttccagcctattacttatttccaattgactacctcattggtcttgggtataggtttgtgtgcgttcctgactttgctcttctattatattaataaagtaaaacgtgcttttgcagattacacccagtgtgctgtaattgctgttgttgctgctgttcttaatagcttgtgcatctgctttgttacctctataccattgtgtatagtaccttacactgcattgtactattatgctacattctattttactaatgagcctgcatttattatgcatgtttcttggtacattatgttcgggcctatcgttcccatatggatgacctgcgtctatacagttgcaatgtgctttagacacttcttctgggttttagcttattttagtaagaaacatgtagaagtttttactgatggtaagcttaattgtagtttccaggacgctgcctctaatatctttgttattaacaaggacacttatgcagctcttagaaactctttaactaatgatgcctattcacgatttttggggttgtttaacaagtataagtacttctctggtgctatggaaacagccgcttatcgtgaagctgcagcatgtcatcttgctaaagccttacaaacatacagcgagactggtagtgatcttctttaccaaccacccaactgtagcataacctctggcgtgttgcaaagcggtttggtgaaaatgtcacatcccagtggagatgttgaggcttgtatggttcaggttacctgcggtagcatgactcttaatggtctttggcttgacaacacagtctggtgcccacgacacgtaatgtgcccggctgaccagttgtctgatcctaattatgatgccttgttgatttctatgactaatcatagtttcagtgtgcaaaaacacattggcgctccagcaaacttgcgtgttgttggtcatgccatgcaaggcactcttttgaagttgactgtcgatgttgctaaccctagcactccagcctacacttttacaacagtgaaacctggcgcagcatttagtgtgttagcatgctataatggtcgtccgactggtacattcactgttgtaatgcgccctaactacacaattaagggttcctttctgtgtggttcttgtggtagtgttggttacaccaaggagggtagtgtgatcaatttctgttacatgcatcaaatggaacttgctaatggtacacataccggttcagcatttgatggtactatgtatggtgcctttatggataaacaagtgcaccaagttcagttaacagacaaatactgcagtgttaatgtagtagcttggctttacgcagcaatacttaatggttgcgcttggtttgtaaaacctaatcgcactagtgttgtttcttttaatgaatgggctcttgccaaccaattcactgaatttgttggcactcaatccgttgacatgttagctgtcaaaacaggcgttgctattgaacagctgctttatgcgatccaacaactgtatactgggttccagggaaagcaaatccttggcagtaccatgttggaagatgaattcacacctgaggatgttaatatgcagattatgggtgtggttatgcagagtggtgtgagaaaagttacatatggtactgcgcattggttgtttgcgacccttgtctcaacctatgtgataatcttacaagccactaaatttactttgtggaactacttgtttgagactattcccacacagttgttcccactcttatttgtgactatggccttcgttatgttgttggttaaacacaaacacacctttttgacacttttcttgttgcctgtggctatttgtttgacttatgcaaacatagtctacgagcccactactcccatttcgtcagcgctgattgcagttgcaaattggcttgcccccactaatgcttatatgcgcactacacatactgatattggtgtctacattagtatgtcacttgtattagtcattgtagtgaagagattgtacaacccatcactttctaactttgcgttagcattgtgcagtggtgtaatgtggttgtacacttatagcattggagaagcctcaagccccattgcctatctggtttttgtcactacactcactagtgattatacgattacagtctttgttactgtcaaccttgcaaaagtttgcacttatgccatctttgcttactcaccacagcttacacttgtgtttccggaagtgaagatgatacttttattatacacatgtttaggtttcatgtgtacttgctattttggtgtcttctctcttttgaaccttaagcttagagcacctatgggtgtctatgactttaaggtctcaacacaagagttcagattcatgactgctaacaatctaactgcacctagaaattcttgggaggctatggctctgaactttaagttaataggtattggcggtacaccttgtataaaggttgctgctatgcagtctaaacttacagatcttaaatgcacatctgtggttctcctctctgtgctccaacagttacacttagaggctaatagtagggcctgggctttctgtgttaaatgccataatgatatattggcagcaacagaccccagtgaggctttcgagaaattcgtaagtctctttgctactttaatgactttttctggtaatgtagatcttgatgcgttagctagtgatatttttgacactcctagcgtacttcaagctactctttctgagttttcacacttagctacctttgctgagttggaagctgcgcagaaagcctatcaggaagctatggactctggtgacacctcaccacaagttcttaaggctttgcagaaggctgttaatatagctaaaaacgcctatgagaaggataaggcagtggcccgtaagttagaacgtatggctgatcaggctatgacttctatgtataagcaagcacgtgctgaagacaagaaagcaaaaattgtcagtgctatgcaaactatgttgtttggtatgattaagaagctcgacaacgatgttcttaatggtatcatttctaacgctaggaatggttgtatacctcttagtgtcatcccactgtgtgcttcaaataaacttcgcgttgtaattcctgacttcaccgtctggaatcaggtagtcacatatccctcgcttaactacgctggggctttgtgggacattacagttataaacaatgtggacaatgaaattgttaagtcttcagatgttgtagacagcaatgaaaatttaacatggccacttgttttagaatgcactagggcatccacttctgccgttaagttgcaaaataatgagatcaaaccttcaggtctaaaaaccatggttgtgtctgcgggtcaagagcaaactaactgtaatactagttccttagcttattacgaacctgtgcagggtcgtaaaatgctgatggctcttctttctgataatgcctatctcaaatgggcgcgtgttgaaggtaaggacggatttgtcagtgtagagctacaacctccttgcaaattcttgattgcgggaccaaaaggacctgaaatccgatatctctattttgttaaaaatcttaacaaccttcatcgcgggcaagtgttagggcacattgctgcgactgttagattgcaagctggttctaacaccgagtttgcctctaattcctcggtgttgtcacttgttaacttcaccgttgatcctcaaaaagcttatctcgatttcgtcaatgcgggaggtgccccattgacaaattgtgttaagatgcttactcctaaaactggtacaggtatagctatatctgttaaaccagagagtacagctgatcaagagacttatggtggagcttcagtgtgtctctattgccgtgcgcatatagaacatcctgatgtctctggtgtttgtaaatataagggtaagtttgtccaaatccctgctcagtgtgtccgtgaccctgtgggattttgtttgtcaaataccccctgtaatgtctgtcaatattggattggatatgggtgcaattgtgactcgcttaggcaagcagcactgccccaatctaaagattccaattttttaaacgagtccggggttctattgtaaatgcccgaatagaaccctgttcaagtggtttgtccactgatgtcgtctttagggcatttgacatctgcaactataaggctaaggttgctggtattggaaaatactacaagactaatacttgtaggtttgtagaattagatgaccaagggcatcatttagactcctattttgtcgttaagaggcatactatggagaattatgaactagagaagcactgttacgacttgttacgtgactgtgatgctgtagctccccatgatttcttcatctttgatgtagacaaagttaaaacacctcatattgtacgtcagcgtttaactgagtacactatgatggatcttgtatatgccctgaggcactttgatcaaaatagcgaagtgcttaaggctatcttagtgaagtatggttgctgtgatgttacctactttgaaaataaactctggtttgattttgttgaaaatcccagtgttattggtgtttatcataaacttggagaacgtgtacgccaagctatcttaaacactgttaaattttgtgaccacatggtcaaggctggtttagtcggtgtgctcacactagacaaccaggaccttaatggcaagtggtatgattttggtgacttcgtaatcactcaacctggttcaggagtagctatagttgatagctactattcttatttgatgcctgtgctctcaatgaccgattgtctggccgctgagacacatagggattgtgattttaataaaccactcattgagtggccacttactgagtatgattttactgattataaggtacaactctttgagaagtactttaaatattgggatcagacgtatcacgcaaattgcgttaattgtactgatgaccgttgtgtgttacattgtgctaatttcaatgtattgtttgctatgaccatgcctaagacttgtttcggacccatagtccgaaagatctttgttgatggcgtgccatttgtagtatcttgtggttatcactacaaagaattaggtttagtcatgaatatggatgttagtctccatagacataggctctctcttaaggagttgatgatgtatgccgctgatccagccatgcacattgcctcctctaacgcttttcttgatttgaggacatcatgttttagtgtcgctgcacttacaactggtttgacttttcaaactgtgcggcctggcaattttaaccaagacttctatgatttcgtggtatctaaaggtttctttaaggagggctcttcagtgacgctcaaacattttttctttgctcaagatggtaatgctgctattacagattataattactattcttataatctgcctactatgtgtgacatcaaacaaatgttgttctgcatggaagttgtaaacaagtacttcgaaatctatgacggtggttgtcttaatgcttctgaagtggttgttaataatttagacaagagtgctggccatccttttaataagtttggcaaagctcgtgtctattatgagagcatgtcttaccaggagcaagatgaactttttgccatgacaaagcgtaacgtcattcctaccatgactcaaatgaatctaaaatatgctattagtgctaagaatagagctcgcactgttgcaggcgtgtccatacttagcacaatgactaatcgccagtaccatcagaaaatgcttaagtccatggctgcaactcgtggagcgacttgcgtcattggtactacaaagttctacggtggctgggatttcatgcttaaaacattgtacaaagatgttgataatccgcatcttatgggttgggattaccctaagtgtgatagagctatgcctaatatgtgtagaatcttcgcttcactcatattagctcgtaaacatggcacttgttgtactacaagggacagattttatcgcttggcaaatgagtgtgctcaggtgctaagcgaatatgttctatgtggtggtggttactacgtcaaacctggaggtaccagtagcggagatgccaccactgcatatgccaatagtgtctttaacattttgcaggcgacaactgctaatgtcagtgcacttatgggtgctaatggcaacaagattgttgacaaagaagttaaagacatgcagtttgatttgtatgtcaatgtttacaggagcactagcccagaccccaaatttgttgataaatactatgcttttcttaataagcacttttctatgatgatactgtctgatgacggtgtcgtttgctataatagtgattatgcagctaagggttacattgctggaatacagaattttaaggaaacgctgtattatcagaacaatgtctttatgtctgaagctaaatgctgggtggaaaccgatctgaagaaagggccacatgaattctgttcacagcatacgctttatattaaggatggcgacgatggttacttccttccttatccagacccttcaagaattttgtctgccggttgctttgtagatgatatcgttaagactgacggtacactcatggtagagcggtttgtgtctttggctatagatgcttaccctctcacaaagcatgaagatatagaataccagaatgtattctgggtctacttacagtatatagaaaaactgtataaagaccttacaggacacatgcttgacagttattctgtcatgctatgtggtgataattctgctaagttttgggaagaggcattctatagagatctctatagttcgcctaccactttgcaggctgtcggttcatgcgttgtatgccattcacagacttccctacgctgtgggacatgcatccgtagaccatttctctgctgtaaatgctgctatgatcatgttatagcaactccacataagatggttttgtctgtttctccttacgtttgtaatgcccctggttgtggcgtttcagacgttactaagctatatttaggtggtatgagctacttttgtgtagatcatagacctgtgtgtagttttccactttgcgctaatggtcttgtattcggcttatacaagaatatgtgcacaggtagtccttctatagttgaatttaataggttggctacctgtgactggactgaaagtggtgattacacccttgccaatactacaacagaaccactcaaactttttgctgctgagactttacgtgccactgaagaggcgtctaagcagtcttatgctattgccaccatcaaagaaattgttggtgagcgccaactattacttgtgtgggaggctggcaagtccaaaccaccactcaatcgtaattatgtttttactggttatcatataaccaaaaatagtaaagtgcagctcggtgagtacattttcgagcgcattgattatagtgatgctgtatcctacaagtctagtacaacgtataaactgactgtaggtgacatcttcgtacttacctctcactctgtggctaccttgacggcgcccacaattgtgaatcaagagaggtatgttaaaattactgggttgtacccaaccattacggtacctgaagagttcgcaagtcatgttgccaacttccaaaaatcaggttatagtaaatatgtcactgttcagggaccacctggcactggcaaaagtcattttgctatagggttagcgatttactaccctacagcacgtgttgtttatacagcatgttcacacgcagctgttgatgctttgtgtgaaaaagcttttaaatatttgaacattgctaaatgttcccgtatcattcctgcaaaggcacgtgttgagtgctatgacaggtttaaagttaatgagacaaattctcaatatttgtttagtactattaatgctctaccagaaacttctgccgatattctggtggttgatgaggttagtatgtgcactaattatgatctttcaattattaatgcacgtattaaagctaagcacattgtctatgtaggagatccagcacagttgccagctcctaggactttgttgactagaggcacattggaaccagaaaatttcaatagtgtcactagattgatgtgtaacttaggtcctgacatatttttaagtatgtgctacaggtgtcctaaggaaatagtaagcactgtgagcgctcttgtctacaataataaattgttagccaagaaggagctttcaggccagtgctttaaaatactctataagggcaatgtgacgcatgatgctagctctgccattaatagaccacaactcacatttgtgaagaattttattactgccaatccggcatggagtaaggcagtctttatttcgccttacaattcacagaatgctgtgtctcgttcaatgctgggtcttaccactcagactgttgattcctcacagggttcagaataccagtacgttatcttctgtcaaacagcagatacggcacatgctaacaacattaacagatttaatgttgcaatcactcgtgcccaaaaaggtattctttgtgttatgacatctcaggcactctttgagtccttagagtttactgaattgtcttttactaattacaagctccagtctcagattgtaactggcctttttaaagattgctctagagaaacttctggcctctcacctgcttatgcaccaacatatgttagtgttgatgacaagtataagacgagtgatgagctttgcgtgaatcttaatttacccgcaaatgtcccatactctcgtgttatttccaggatgggctttaaactcgatgcaacagttcctggatatcctaagcttttcattactcgtgaagaggctgtaaggcaagttcgaagctggataggcttcgatgttgagggtgctcatgcttcccgtaatgcatgtggcaccaatgtgcctctacaattaggattttcaactggtgtgaactttgttgttcagccagttggtgttgtagacactgagtggggtaacatgttaacgggcattgctgcacgtcctccaccaggtgaacagtttaagcacctcgtgcctcttatgcataagggggctgcgtggcctattgttagacgacgtatagtgcaaatgttgtcagacactttagacaaattgtctgattactgtacgtttgtttgttgggctcatggctttgaattaacgtctgcatcatacttttgcaagataggtaaggaacagaagtgttgcatgtgcaatagacgcgctgcagcgtactcttcacctctgcaatcttatgcctgctggactcattcctgcggttatgattatgtctacaaccctttctttgtcgatgttcaacagtggggttatgtaggcaatcttgctactaatcacgatcgttattgctctgtccatcaaggagctcatgtggcttctaatgatgcaataatgactcgttgtttagctattcattcttgttttatagaacgtgtggattgggatatagagtatccttatatctcacatgaaaagaaattgaattcctgttgtagaatcgttgagcgcaacgtcgtacgtgctgctcttcttgccggttcatttgacaaagtctatgatattggcaatcctaaaggaattcctattgttgatgaccctgtggttgattggcattattttgatgcacagcccttgaccaggaaggtacaacagcttttctatacagaggacatggcctcaagatttgctgatgggctctgcttattttggaactgtaatgtaccaaaatatcctaataatgcaattgtatgcaggtttgacacacgtgtgcattctgagttcaatttgccaggttgtgatggcggtagtttgtatgttaacaagcacgcttttcatacaccagcatatgatgtgagtgcattccgtgatctgaaacctttaccattcttttattattctactacaccatgtgaagtgcatggtaatggtagtatgatagaggatattgattatgtacccctaaaatctgcagtctgtattacagcttgtaatttagggggcgctgtttgtaggaagcatgctacagagtacagagagtatatggaagcatataatcttgtctctgcatcaggtttccgcctttggtgttataagacctttgatatttataatctctggtctacttttacaaaagttcaaggtttggaaaacattgcttttaatgttgttaaacaaggccattttattggtgttgagggtgaactacctgtagctgtagtcaatgataagatcttcaccaagagtggcgttaatgacatttgtatgtttgagaataaaaccactttgcctactaatatagcttttgaactctatgctaagcgtgctgtacgctcgcatcccgatttcaaattgctacacaatttacaagcagacatttgctacaagttcgtcctttgggattatgaacgtagcaatatttatggtactgctactattggtgtatgtaagtacactgatattgatgttaattcagctttgaatatatgttttgacatacgcgataattgttcattggagaagttcatgtctactcccaatgccatctttatttctgatagaaaaatcaagaaatacccttgtatggtaggtcctgattatgcttacttcaatggtgctatcatccgtgatagtgatgttgttaaacaaccagtgaagttctacttgtataagaaagtcaataatgagtttattgatcctactgagtgtatttacactcagagtcgctcttgtagtgacttcctacccctttctgacatggagaaagactttctatcttttgatagtgatgttttcattaagaagtatggcttggaaaactatgcttttgagcacgtagtctatggagacttctctcatactacgttaggcggtcttcacttgcttattggtttatacaagaagcaacaggaaggtcatattattatggaagaaatgctaaaaggtagctcaactattcataactattttattactgagactaacacagcggcttttaaggcggtgtgttctgttatagatttaaagcttgacgactttgttatgattttaaagagtcaagaccttggcgtagtatccaaggttgtcaaggttcctattgacttaacaatgattgagtttatgttatggtgtaaggatggacaggttcaaaccttctaccctcgactccaggcttctgcagattggaaacctggtcatgcaatgccatccctctttaaagttcaaaatgtaaaccttgaacgttgtgagcttgctaattacaagcaatctattcctatgcctcgcggtgtgcacatgaacatcgctaaatatatgcaattgtgccagtatttaaatacttgcacattagccgtgcctgccaatatgcgtgttatacattttggcgctggttctgataaaggtatcgctcctggtacctcagttttacgacagtggcttcctacagatgccattattatagataatgatttaaatgagttcgtgtcagatgctgacataactttatttggagattgtgtaactgtacgtgtcggccaacaagtggatcttgttatttccgacatgtatgatcctactactaagaatgtaacaggtagtaatgagtcaaaggctttattctttacttacctgtgtaacctcattaataataatcttgctcttggtgggtctgttgctattaaaataacagaacactcttggagcgttgaactttatgaacttatgggaaaatttgcttggtggactgttttctgcaccaatgcaaatgcatcctcatctgaaggattcctcttaggtattaattacttgggtactattaaagaaaatatagatggtggtgctatgcacgccaactatatattttggagaaattccactcctatgaatctgagtacttactcactttttgatttatccaagtttcaattaaaattaaaaggaacaccagttcttcaattaaaggagagtcaaattaacgaactcgtaatatctctcctgtcgcagggtaagttacttatccgtgacaatgatacactcagtgtttctactgatgttcttgttaacacctacagaaagttacgttgatgtagggccagattctgttaagtctgcttgtattgaggttgatatacaacagactttctttgataaaacttggcctaggccaattgatgtttctaaggctgacggtattatataccctcaaggccgtacatattctaacataactatcacttatcaaggtctttttccctatcagggagaccatggtgatatgtatgtttactctgcaggacatgctacaggcacaactccacaaaagttgtttgtagctaactattctcaggacgtcaaacagtttgctaatgggtttgtcgtccgtataggagcagctgccaattccactggcactgttattattagcccatctaccagcgctactatacgaaaaatttaccctgcttttatgctgggttcttcagttggtaatttctcagatggtaaaatgggccgcttcttcaatcatactctagttcttttgcccgatggatgtggcactttacttagagctttttattgtattctagagcctcgctctggaaatcattgtcctgctggcaattcctatacttcttttgccacttatcacactcctgcaacagattgttctgatggcaattacaatcgtaatgccagtctgaactcttttaaggagtattttaatttacgtaactgcacctttatgtacacttataacattaccgaagatgagattttagagtggtttggcattacacaaactgctcaaggtgttcacctcttctcatctcggtatgttgatttgtacggcggcaatatgtttcaatttgccaccttgcctgtttatgatactattaagtattattctatcattcctcacagtattcgttctatccaaagtgatagaaaagcttgggctgccttctacgtatataaacttcaaccgttaactttcctgttggatttttctgttgatggttatatacgcagagctatagactgtggttttaatgatttgtcacaactccactgctcatatgaatccttcgatgttgaatctggagtttattcagtttcgtctttcgaagcaaaaccttctggctcagttgtggaacaggctgaaggtgttgaatgtgatttttcacctcttctgtctggcacacctcctcaggtttataatttcaagcgtttggtttttaccaattgcaattataatcttaccaaattgctttcacttttttctgtgaatgattttacttgtagtcaaatatctccagcagcaattgctagcaactgttattcttcactgattttggattacttttcatacccacttagtatgaaatccgatctcagtgttagttctgctggtccaatatcccagtttaattataaacagtccttttctaatcccacatgtttgattttagcgactgttcctcataaccttactactattactaagcctcttaagtacagctatattaacaagtgctctcgtcttctttctgatgatcgtactgaagtacctcagttagtgaacgctaatcaatactcaccctgtgtatccattgtcccatccactgtgtgggaagacggtgattattataggaaacaactatctccacttgaaggtggtggctggcttgttgctagtggctcaactgttgccatgactgagcaattacagatgggctttggtattacagttcaatatggtacagacaccaatagtgtttgccccaagcttgaatttgctaatgacacaaaaattgcctctcaattaggcaattgcgtggaatattccctctatggtgtttcgggccgtggtgtttttcagaattgcacagctgtaggtgttcgacagcagcgctttgtttatgatgcgtaccagaatttagttggctattattctgatgatggcaactactactgtttgcgtgcttgtgttagtgttcctgtttctgtcatctatgataaagaaactaaaacccacgctactctatttggtagtgttgcatgtgaacacatttcttctaccatgtctcaatactcccgttctacgcgatcaatgcttaaacggcgagattctacatatggcccccttcagacacctgttggttgtgtcctaggacttgttaattcctctttgttcgtagaggactgcaagttgcctcttggtcaatctctctgtgctcttcctgacacacctagtactctcacacctcgcagtgtgcgctctgttccaggtgaaatgcgcttggcatccattgcttttaatcatcctattcaggttgatcaacttaatagtagttattttaaattaagtatacccactaatttttcctttggtgtgactcaggagtacattcagacaaccattcagaaagttactgttgattgtaaacagtacgtttgcaatggtttccagaagtgtgagcaattactgcgcgagtatggccagttttgttccaaaataaaccaggctctccatggtgccaatttacgccaggatgattctgtacgtaatttgtttgcgagcgtgaaaagctctcaatcatctcctatcataccaggttttggaggtgactttaatttgacacttctagaacctgtttctatatctactggcagtcgtagtgcacgtagtgctattgaggatttgctatttgacaaagtcactatagctgatcctggttatatgcaaggttacgatgattgcatgcagcaaggtccagcatcagctcgtgatcttatttgtgctcaatatgtggctggttacaaagtattacctcctcttatggatgttaatatggaagccgcgtatacttcatctttgcttggcagcatagcaggtgttggctggactgctggcttatcctcctttgctgctattccatttgcacagagtatcttttataggttaaacggtgttggcattactcaacaggttctttcagagaaccaaaagcttattgccaataagtttaatcaggctctgggagctatgcaaacaggcttcactacaactaatgaagcttttcagaaggttcaggatgctgtgaacaacaatgcacaggctctatccaaattagctagcgagctatctaatacttttggtgctatttccgcctctattggagacatcatacaacgtcttgatgttctcgaacaggacgcccaaatagacagacttattaatggccgtttgacaacactaaatgcttttgttgcacagcagcttgttcgttccgaatcagctgctctttccgctcaattggctaaagataaagtcaatgagtgtgtcaaggcacaatccaagcgttctggattttgcggtcaaggcacacatatagtgtcctttgttgtaaatgcccctaatggcctttacttcatgcatgttggttattaccctagcaaccacattgaggttgtttctgcttatggtctttgcgatgcagctaaccctactaattgtatagcccctgttaatggctactttattaaaactaataacactaggattgttgatgagtggtcatatactggctcgtccttctatgcacctgagcccattacctcccttaatactaagtatgttgcaccacaggtgacataccaaaacatttctactaacctccctcctcctcttctcggcaattccaccgggattgacttccaagatgagttggatgagtttttcaaaaatgttagcaccagtatacctaattttggttccctaacacagattaatactacattactcgatcttacctacgagatgttgtctcttcaacaagttgttaaagcccttaatgagtcttacatagaccttaaagagcttggcaattatacttattacaacaaatggccgtggtacatttggcttggtttcattgctgggcttgttgccttagctctatgcgtcttcttcatactgtgctgcactggttgtggcacaaactgtatgggaaaacttaagtgtaatcgttgttgtgatagatacgaggaatacgacctcgagccgcataaggttcatgttcactaattaacgaactattaatgagagttcaaagaccacccactctcttgttagtgttttcactctctcttttggtcactgcatcctcaaaacctctctatgtacctgagcattgtcagaattattctggttgcatgcttagggcttgtattaaaactgcccaagctgatacagctggtctttatacaaattttcgaattgacgtcccatctgcagaatcaactggtactcaatcagtttctgtcgatcttgagtcaacttcaactcatgatggtcctaccgaacatgttactagtgtgaatctttttgacgttggttactcagttaattaacgaactctatggattacgtgtctctgcttaatcaaatttggcagaagtaccttaactcaccgtatactacttgtttgtacatccctaaacccacagctaagtatacacctttagttggcacttcattgcaccctgtgctgtggaactgtcagctatcctttgctggttatactgaatctgctgttaattctacaaaagctttggccaaacaggacgcagctcagcgaatcgcttggttgctacataaggatggaggaatccctgatggatgttccctctacctccggcactcaagtttattcgcgcaaagcgaggaagaggagccattctccaactaagaaactgcgctacgttaagcgtagattttctcttctgcgccatgaagaccttagtgttattgtccaaccaacacactatgtcagggttacattttcagaccccaacatgtggtatctacgttcgggtcatcatttacactcagttcacaattggcttaaaccttatggcggccaacctgtttctgagtaccatattactctagctttgctaaatctcactgatgaagatttagctagagatttttcacccattgcgctctttttgcgcaatgtcagatttgagctacatgagttcgccttgctgcgcaaaactcttgttcttaatgcatcagagatctactgtgctaacatacatagatttaagcctgtgtatagagttaacacggcaatccctactattaaggattggcttctcgttcagggattttccctttaccatagtggcctccctttacatatgtcaatctctaaattgcatgcactggatgatgttactcgcaattacatcattacaatgccatgctttagaacttaccctcaacaaatgtttgttactcctttggccgtagatgttgtctccatacggtcttccaatcagggtaataaacaaattgttcattcttatcccattttacatcatccaggattttaacgaactatggctttctcggcgtctttatttaaacccgtccagctagtcccagtttctcctgcatttcatcgcattgagtctactgactctattgttttcacatacattcctgctagcggctatgtagctgctttagctgtcaatgtgtgtctcattcccctattattactgctacgtcaagatacttgtcgtcgcagcattatcagaactatggttctctatttccttgttctgtataactttttattagccattgtactagtcaatggtgtacattatccaactggaagttgcctgatagccttcttagttatcctcataatactttggtttgtagatagaattcgtttctgtctcatgctgaattcctacattccactgtttgacatgcgttcccactttattcgtgttagtacagtttcttctcatggtatggtccctgtaatacacaccaaaccattatttattagaaacttcgatcagcgttgcagctgttctcgttgtttttatttgcactcttccacttatatagagtgcacttatattagccgttttagtaagattagcctagtttctgtaactgacttctccttaaacggcaatgtttccactgttttcgtgcctgcaacgcgcgattcagttcctcttcacataatcgccccgagctcgcttatcgtttaagcagctctgcgctactatgggtcccgtgtagaggctaatccattagtctctctttggacatatggaaaacgaactatgttaccctttgtccaagaacgaatagggttgttcatagtaaactttttcatttttaccgtagtatgtgctataacactcttggtgtgtatggctttccttacggctactagattatgtgtgcaatgtatgacaggcttcaataccctgttagttcagcccgcattatacttgtataatactggacgttcagtctatgtaaaattccaggatagtaaaccccctctaccacctgacgagtgggtttaacgaactccttcataatgtctaatatgacgcaactcactgaggcgcagattattgccattattaaagactggaactttgcatggtccctgatctttctcttaattactatcgtactacagtatggatacccatcccgtagtatgactgtctatgtctttaaaatgtttgttttatggctcctatggccatcttccatggcgctatcaatatttagcgccgtttatccaattgatctagcttcccagataatctctggcattgtagcagctgtttcagctatgatgtggatttcctactttgtgcagagtatccggctgtttatgagaactggatcatggtggtcattcaatcctgagactaattgccttttgaacgttccatttggtggtacaactgtcgtacgtccactcgtagaggactctaccagtgtaactgctgttgtaaccaatggccacctcaaaatggctggcatgcatttcggtgcttgtgactacgacagacttcctaatgaagtcaccgtggccaaacccaatgtgctgattgctttaaaaatggtgaagcggcaaagctacggaactaattccggcgttgccatttaccatagatataaggcaggtaattacaggagtccgcctattacggcggatattgaacttgcattgcttcgagcttaggctctttagtaagagtatcttaattgattttaacgaatctcaatttcattgttatggcatcccctgctgcacctcgtgctgtttcctttgccgataacaatgatataacaaatacaaacctatctcgaggtagaggacgtaatccaaaaccacgagctgcaccaaataacactgtctcttggtacactgggcttacccaacacgggaaagtccctcttacctttccacctgggcagggtgtacctcttaatgccaattctacccctgcgcaaaatgctgggtattggcggagacaggacagaaaaattaataccgggaatggaattaagcaactggctcccaggtggtacttctactacactggaactggacccgaagcagcactcccattccgggctgttaaggatggcatcgtttgggtccatgaagatggcgccactgatgctccttcaacttttgggacgcggaaccctaacaatgattcagctattgttacacaattcgcgcccggtactaagcttcctaaaaacttccacattgaggggactggaggcaatagtcaatcatcttcaagagcctctagcttaagcagaaactcttccagatctagttcacaaggttcaagatcaggaaactctacccgcggcacttctccaggtccatctggaatcggagcagtaggaggtgatctactttaccttgatcttctgaacagactacaagcccttgagtctggcaaagtaaagcaatcgcagccaaaagtaatcactaagaaagatgctgctgctgctaaaaataagatgcgccacaagcgcacttccaccaaaagtttcaacatggtgcaagcttttggtcttcgcggaccaggagacctccagggaaactttggtgatcttcaattgaataaactcggcactgaggacccacgttggccccaaattgctgagcttgctcctacagccagtgcttttatgggtatgtcgcaatttaaacttacccatcagaacaatgatgatcatggcaaccctgtgtacttccttcggtacagtggagccattaaacttgacccaaagaatcccaactacaataagtggttggagcttcttgagcaaaatattgatgcctacaaaaccttccctaagaaggaaaagaaacaaaaggcaccaaaagaagaatcaacagaccaaatgtctgaacctccaaaggagcagcgtgtgcaaggtagcatcactcagcgcactcgcacccgtccaagtgttcagcctggtccaatgattgatgttaacactgattagtgtcactcaaagtaacaagatcgcggcaatcgtttgtgtttggcaaccccatctcaccatcgcttgtccactcttgcacagaatggaatcatgttgtaattacagtgcaataaggtaattataacccatttaattgatagctatgctttattaaagtgtgtagctgtagagagaatgttaaagactgtcacctctgcttgattgcaagtgaacagtgccccccgggaagagctctacagtgtgaaatgtaaataaaaaatagctattattcaattagattaggctaattagatgatttgcaaaaaaaaaaaa

SEQ ID NO: 2410 - DNA, 30741 bp, Unknown
  Description of Unknown: Human coronavirus
attgtgagcgatttgcgtgcgtgcatcccgcttcactgatctcttgttagatctttttgtaatctaaactttataaaaacatccactccctgtaatctatgcttgtgggcgtagatttttcatagtggtgtttatattcatttctgctgttaacagctttcagccagggacgtgttgtatcctaggcagtggcccgcccataggtcacaatgtcgaagatcaacaaatacggtctcgaactacactgggctccagaatttccatggatgtttgaggacgcagaggagaagttggataaccctagtagttcagaggtggatatgatttgctccaccactgcgcaaaagctggaaacagacggaatttgtcctgaaaatcatgtgatggtggattgtcgccgacttcttaaacaagagtgttgtgtgcagtctagcctaatacgtgaaattgttatgaatgcaagtccatatgatttggaggtgctacttcaagatgctttgcagtcccgtgaagcagttttggttacaacccccttaggtatgtctttagaggcatgctatgtgagaggttgtaatcctaaaggatggaccatgggtttgtttcggcgtagaagtgtgtgtaacactggtcgttgcactgttaataagcatgtggcctatcagttatatatgattgatcctgcaggtgtctgtcttggtgcaggtcaattcgtgggttgggtcatacccttagcctttatgcctgtgcaatcccggaaatttattgttccatgggttatgtacttgcgtaagcgtggcgaaaagggtgcttacaataaagatcatggacgtggcggttttggacatgtttatgattttaaagttgaagatgcttatgaccaggtgcatgatgagcctaagggtaagttttctaagaaggcttatgctttaattagagggtatcgtggtgttaaaccacttctctatgtagaccagtatggttgtgattatactggtagtcttgcagatggcttagaggcttatgctgataagacattgcaagaaatgaaggcattatttcctacttggagtcaggaactcctttttgatgtaattgtggcatggcatgttgtgcgtgatccacgttatgttatgagattgcagagtgctgctactatacgtagtgttgcatatgttgctaatcctactgaagacttgtgtgatggttctgttgttataaaagaacctgtgcatgtttatgcagatgactctattattttacgtcaatataatttagttgacattatgagtcatttttatatggaggcagatacagttgtaaatgctttttatggtgttgctttgaaagattgcggttttgttatgcagtttggttacattgattgcgaacaagactcgtgtgattttaaaggttggattcctggtaacatgatagatggttttgcttgcaccacttgtggtcatgtttatgaagtaggtgatttgatggcacaatcttcaggtgttttgcctgttaaccctgtattgcatactaagagtgcagcaggctatggtggttttggttgtaaagattcttttactctgtatggccaaactgtagtttattttggaggttgtgtgtattggagtccagcacgtaatatatggattcctatattaaaatcctctgttaagtcatatgacagtttggtttatactggagttttaggttgcaaggctattgtaaaggaaacaaatctcatttgcaaagctttgtaccttgattatgttcaacacaagtgtggcaatttacaccaacgggagttgctaggtgtttcagatgtgtggcataaacaattgctattaaatagaggtgtttataaacctctgttagagaatattgattattttaatatgcggcgcgctaaatttagtttagaaacttttactgtttgtgcagatggctttatgccttttcttttagatgatttagttccacgcgcatattatttggcagtaagtggtcaagcattttgtgattatgcagataaactttgccatgccgttgtgtctaagagtaaagagttacttgatgtgtctctggattctttaggtgcagctatacattatttgaattctaagattgttgatttggctcaacattttagtgattttggaacaagtttcgtttctaaaattgttcatttctttaagacttttactactagcactgctcttgcatttgcatgggttttatttcatgttttgcatggtgcttatatagtagtggagagtgatatatattttgttaaaaacattcctcgttatgctagtgctgttgcacaagcatttcagagtgttgctaaagttgtactggactctttaagagttacttttattgatggcctttcttgttttaagattggacgtagaagaatttgtctttcaggcagaaaaatttatgaagttgagcgtggcttgttacattcatcccaattgccattagatgtttatgatttaaccatgcctagtcaagttcagaaagccaagcaaaaacctatttatttaaaaggttctggttctgatttttcattagcggatagtgtagttgaagttgttacaacttcacttacaccatgtggttattctgaaccacctaaagttgcagctaaaatttgcattgtggataatgtttatatggccaaggctggtgacaaatattaccctgttgtggttgatgatcatgttggactcttggatcaagcatggagagttccttgtgctggaaggcgtgttacatttaaggaacagcctacagtaaaggagattataagcatgcctaagattattaaggttttttatgagcttgacaacgattttaatactattttaaatactgcgtgtggagtgtttgaagtggatgatactgttgatatggaggaattttatgctgtggtgattgatgccatagaagagaaactttctccatgtaaggagcttgaaggtgtaggtgctaaagttagtgcctttttacagaaattagaggataatcccctatttttatttgatgaggctggcgaggaagttcttgctcctaaattgtattgtgcctttacagctcctgaagatgatgactttcttgaggaaagtgatgttgaagaagatgatgtagaaggtgaggaaactgatttaactgtcacaagtgctggacagccttgtgttgctagtgaacaggaggagtcttctgaagtcttagaggacactttggatgatggtccaagtgtggagacatctgattcacaagttgaagaagatgtagaaatgtcggattttgttgatcttgaatctgtgattcaggattatgaaaatgtttgttttgagttttatactacagagccagaatttgttaaagttttgggtctgtatgtgcctaaagcaactcgcaacaattgctggttgcgatcagttttggcagtgatgcagaaattgccctgtcaatttaaagataaaaatttgcaggatctttgggtgttatacaagcaacagtatagtcagttgtttgttgataccttggttaataagatacctgctaatattgtacttccacaaggtggttatgttgctgattttgcatattggtttttaaccttatgtgattggcagtgtgttgcatactggaaatgcattaaatgtgatttagctcttaagcttaaaggcttggatgctatgttcttttatggtgatgttgtttcacatatatgcaagtgtggtgagtctatggtacttattgatgttgatgtgccatttacagcccactttgctcttaaagataagttgttttgtgcatttattactaagcgtattgtgtataaagcagcttgtgttgtggatgttaatgatagtcattctatggctgttgttgatggtaaacaaattgatgatcatcgtatcactagtattactagtgataagtttgattttattattgggcatggtatgtcattttcaatgactacttttgaaattgcccaattgtatggttcttgtataacacctaatgtgtgttttgttaaaggtgatataattaaagtatctaagcttgttaaagcagaagttgttgtaaaccctgctaatggccatatggcacatggtggtggtgttgcaaaagctattgcagtagcagctggacagcagtttgttaaagagactaccgatatggttaagtctaaaggagtttgtgctactggagattgttatgtctctacagggggcaaattatgtaaaactgtgcttaatgttgttggacctgatgcgagaacacagggtaaacaaagttatgtattgttagagcgtgtttataaacatcttaacaactatgactgtgttgttacaactttgatctcagctggtatatttagtgtgccttctgatgtgtctttaacatatctacttggtactgctaagaaacaagttgttcttgttagcaataatcaagaggattttgatcttatttctaagtgtcagataactgctgttgagggcactaagaaattggcagcgcgtctttcttttaatgttggacgttccattgtttacgaaacagatgctaataagttgattttaatcaatgacgttgcatttgtttcgacatttaatgttttacaggatgttttatccttaagacatgatatagcacttgatgatgatgcacgaaccttcgttcagagcaatgttgatgttgtacctgagggttggcgtgttgtcaataagttttatcaaattaatggtgttagaaccgttaagtattttgagtgtactggaggcatagatatatgcagccaggataaagtttttggttatgtacagcagggtatttttaataaggctactgttgctcaaattaaagccttgtttttggataaagtggacatcttgctaactgttgatggtgttaatttcactaataggtttgtgcctgttggtgaaagttttggtaagagtctaggaaatgtgttttgtgatggagttaatgtcacgaagcataagtgtgatataaattataaaggtaaagtctttttccagtttgataatctttctagtgaagatttaaaggctgtaagaagttcctttaattttgatcagaaggaattgcttgcctattacaacatgcttgttaattgttttaagtggcaggttgttgttaatggtaagtatttcacttttaagcaagctaataacaattgttttgttaatgtttcttgcttaatgctccagagtttgcatctgacatttaaaattgttcaatggcaagaggcatggcttgaatttcgttctggccgccctgctagatttgtagctttggttttggccaaaggtgggtttaaatttggagatcctgctgattctagagatttcttgcgtgttgtgtttagtcaagttgatttgactggggcaatatgtgattttgaaattgcatgtaaatgtggtgtaaagcaggaacagcgtactggtctggacgctgttatgcattttggtacattgagtcgtgaagatcttgagattggttataccgtggactgttcttgcggtaaaaagctaattcattgtgtacgatttgatgtaccatttttaatttgcagtaatacacctgctagtgtaaaattacctaagggtgtaggaagtgcaaatatttttataggtgataaggttggtcattatgttcatgttaagtgtgaacaatcttatcagctttatgatgcttctaatgttaagaaggttacagatgttactggcaagttgtcagattgtctgtatcttaaaaatttgaaacaaacttttaaatcggtgttaaccacctattatttggatgatgttaagaaaattgagtataaacctgacttgtcacaatattattgtgacggaggtaagtattatactcagcgtattattaaagcccaatttaaaacattcgagaaagtagatggtgtgtatactaattttaaattgataggacacaccgtctgtgacagtcttaatgctaagttgggttttgatagctctaaagagtttgttgaatataagattactgagtggccaacagctacaggtgatgtggtgttggctactgatgatttgtatgttaagagatatgagaggggttgtattacttttggtaaacctgttatatggttaagccatgagaaagcttccctcaattctttaacatattttaatagaccttcattggttgatgataataaatttgatgttttaaaagtggatgatgttgacgatggtggtgacagctcagagagtggtgccaaagaaaccaaagaaatcaacattattaagttaagtggtgttaaaaaaccatttaaggttgaagatagtgtcattgttaatgatgatactagtgaaaccaaatatgttaagagtttgtctattgttgatgtgtatgatatgtggcttacaggttgtaagtatgttgttagaactgctaatgctttgagcagagcagttaacgtacctacaatacgtaagtttataaaatttggtatgactcttgttagtataccaattgatttgttaaatttaagagagattaagcctgctgttaatgtggttaaagctgtgcgaaataaaatttctgtatgctttaattttattaaatggctttttgtcttattatttggctggattaaaatatccgctgataataaagtaatctacaccacagaaattgcatcaaagcttacgtgtaagcttgtagctttagcttttaaaaatgcatttttgacatttaagtggagtatggttgctagaggtgcttgcattatagcgactatatttctattgtggtttaattttatatatgccaatgtaatttttagtgatttttatttgcctaaaatcggtttcttgccgacttttgttggtaagattgcacagtggattaagaacacttttagtcttgtaactatttgtgatctatattccattcaggatgtgggttttaagaatcagtattgtaatggaagtattgcatgtcagttctgcttggcaggatttgatatgttagataattataaagccattgatgtagtacagtatgaagctgataggagagcatttgttgattatacaggtgtgttaaagattgtcattgaattgatagttagttacgccctgtatacggcatggttttatccattgtttgcccttatcagtattcagatcttgaccacttggctgcctgagctttttatgcttagtacattacattggagttttaggttgctggtggctttagctaatatgttaccagcacatgtgtttatgaggttttatattattattgcctcttttattaagctctttagcttgtttaggcatgttgcctatggttgtagtaaatctggttgtttgttttgttacaagaggaatcgtagtctacgtgttaaatgtagtactatcgttggtggcatgatacgctattacgatgttatggctaatggtggcactggcttttgttcaaaacatcaatggaattgcattgattgtgattcttataaaccaggtaatacttttattactgttgaggccgctcttgatctatctaaggaattgaaacggcccattcagcctacagatgttgcttatcatacggttactgatgttaagcaagttggttgttctatgcgcttgttctatgatcgtgatggacagcgcacatatgatgatgttaatgctagtttgtttgtggattatagtaatttgctacattctaaggttaagagtgtgcctaatatgcatgttgtggtagtggaaaatgatgctgataaagccaattttctgaatgctgctgtattttatgcacagtctttgtttagacctattttaatggttgataaaaatctgataactactgctaacactggtacgtctgttacagaaactatgtttgatgtttatgtggatacatttttgtctatgtttgatgtggataaaaagagtcttaatgctttaatagcaactgcgcattcttctataaaacagggtacgcagatttataaagttttggatacctttttaagctgtgctcgtaaaagttgttctattgattcagatgttgatactaagtgtttagctgattctgtcatgtctgctgtatcggcaggtcttgaattgacggatgaaagttgtaataacttggtgccaacatatttgaagagtgacaacattgtggcagctgatttaggtgttctgattcaaaattctgcaaagcatgtgcagggtaatgttgctaaaatagctggtgtttcctgtatatggtctgtggatgcttttaatcagtttagttctgatttccagcataaattgaagaaagcatgttgtaaaactggtttgaaactgaagcttacttataataagcagatggctaatgtctctgttttaactacaccctttagtcttaaagggggtgcagtttttagttattttgtttatgtgtgttttgtgttgagtttggtctgttttattggactgtggtgcttaatgcccacttacacagtacacaaatcagattttcagcttcccgtttatgccagttataaagttttagataatggtgttattagagatgttagcgttgaagatgtttgtttcgctaacaaatttgaacaatttgatcaatggtatgagtctacatttggtctaagttattatagtaacagtatggcttgtcccattgttgttgctgtaatagatcaggattttggctctacagtgtttaatgtccctaccaaagtgttacgatatggttatcatgtgttgcactttattacacatgcactttctgctgatggagtgcagtgttatacgccacatagtcaaatatcgtattctaatttttatgctagtggctgtgtgctttcctctgcttgcactatgtttacaatggccgatggtagtccacaaccttattgttatacagaggggcttatgcaaaatgcttctctgtatagttcattggtacctcacgtgcggtataatcttgctaatgctaaaggttttatccgttttccagaagtgttgcgagaagggcttgtacgtatcgtgcgtactcgttctatgtcgtattgcagagttggattatgtgaggaagctgatgagggtatatgctttaattttaatggttcttgggtgcttaataatgattattatagatcattgcctgggaccttttgtggtagagatgtttttgatttaatttatcagctatttaaaggtttagcacagcctgtggattttttggcattgactgctagttccattgctggtgctatactcgctgtaattgttgttttggtgttttattacctaataaagcttaaacgtgcttttggtgattacaccagtgttgtttttgttaacgtgattgtgtggtgtgtaaattttatgatgctttttgtgtttcaagtttaccccatactttcttgtgtatatgctatttgttatttttatgccacgctttatttcccttcggagataagtgtgataatgcacttacaatggctagttatgtatggcactattatgcctttatggttttgtttgctatatatagctgttgttgtttcaaatcatgctttttgggtattttcttactgcagaaagcttggtacttctgttcgtagtgatggtacatttgaagaaatggctctcactacttttatgattacaaaagattcttattgtaagcttaagaattctttgtctgatgttgcttttaatagatatttgagtttgtataataaatataggtattacagcggtaaaatggatactgctgcatatagggaggctgcttgctctcagttggctaaagcaatggacacatttaccaataataatggtagtgatgtgctttaccaaccgcctactgcttccgtctcaacttcattcttgcaatctggtattgtgaaaatggtaaatcctacttctaaggtagaaccatgtgttgtcagtgttacctatggtaatatgacattgaatggtttatggttggatgacaaggtctactgtcccagacatgtaatatgttctgcttcagatatgactaatccagattatacaaatttgttgtgtagagtaacatcaagtgattttactgtattgtttgatcgtctaagccttacagtgatgtcttatcaaatgcggggttgtatgcttgttcttacagtgaccctgcaaaattctcgtacgccaaaatatacatttggtgtggttaaacctggtgagacttttactgttttagctgcttataacggcaaaccacaaggagcctttcatgtaactatgcgtagtagttataccattaagggttcctttttatgcggatcttgtggatctgttggttatgtaataatgggtgattgtgttaaatttgtttatatgcatcaattggagcttagtactggttgtcatactggtactgacttcaatggggatttttatggtccttataaggatgctcaggttgttcagttgctcattcaggattatatacaatctgttaattttgtagcatggctttatgctgctatacttaacaattgtaattggtttgtacaaagtgataagtgttctgtagaagattttaatgtgtgggctctgtccaatggatttagccaagttaaatctgaccttgttatagatgctttagcttctatgactggtgtgtctttggaaacactgttggctgctattaagcgtcttaagaatggtttccaaggacgtcagattatgggtagttgctcttttgaggatgaattgacacctagcgatgtttatcaacaactcgctggtatcaagttacaatcaaaacgcactagattgtttaaaggcactgtttgttggattatggcttctacatttttgtttagttgcataattacagcatttgtgaaatggactatgtttatgtatgtaactactaatatgtttagtattacgttttgtgcactttgtgttataagtttggccatgttgttggttaagcataagcatctttatttgactatgtatataactcctgtgctttttacactgttgtataacaactatttggttgtgtacaagcatacatttagaggctatgtctatgcatggctatcatattatgttccatcagttgagtacacttatactgatgaagttatttatggcatgttattgcttgtaggaatggtctttgttacattacgtagcattaaccatgatttgttttcttttataatgtttgttggtcgtttgatttctgttttctctttgtggtacaagggttctaacttagaggaagaaattcttcttatgttggcttccctttttggtacttacacatggacaacagttttatctatggctgtagcaaaggttattgctaagtgggttgctgtgaatgtcttgtatttcacagatatacctcaaattaagatagtgcttttgtgctatttgtttattggttatattattagctgttattggggcttgttttccttgatgaacagtttgtttagaatgcctttgggtgtttataattataaaatttcagtacaggaattaagatatatgaatgctaatggattgcgccctcctaagaatagttttgaagcccttatgcttaattttaagctgttgggtattggaggtgttccaatcattgaagtatctcaatttcaatcaaaattgactgatgtcaaatgtgctaatgtcgtcttgcttaattgcttgcaacatttgcatgttgcttctaattctaagttgtggcattattgtagcactttgcacaatgaaatacttgccacttcggatctgagtgttgcttttgaaaagcttgctcagttattaattgttttgtttgctaatccagctgctgtggatagcaagtgcctgactagtattgaagaagtttgcgatgattacgcaaaggacaatactgttttgcaggctttacagagtgaatttgttaatatggctagcttcgttgaatatgaagttgctaagaaaaatcttgatgaggcgcgttttagtggttctgctaatcaacagcagttaaaacagctagagaaagcctgtaatattgctaaatctgcttatgaacgcgaccgtgctgtagcaaaaaagttggagcgtatggctgatttggctctcactaatatgtataaagaagctagaattaatgataagaagagtaaggttgtttctgccttgcaaactatgctttttagtatggtgcgtaagttagataatcaagctctgaattcaatattagataacgctgtgaagggttgtgtaccattgaatgcaataccttcattggcagcaaatactctgaatataattgtaccagataaaagtgtttatgaccaggtagttgataatgtctatgttacctatgcgggtaatgtatggcagattcaaactatccaggattcagatggtacaaataagcagttgaatgagatatctgatgattgtaactggccactagttattattgcaaatcggtataatgaggtatctgctactgttttgcaaaataatgaattaatgcctgctaagttgaaaattcaggttgttaatagtggtccagatcagacttgtaatacacctactcaatgttactataataatagtaacaatgggaagattgtttatgctatacttagtgatgttgatggtcttaagtatacaaaaattcttaaagatgatggcaattttgttgttttggagttagatcctccttgtaaatttactgttcaagatgctaaaggtcttaaaattaagtacctttattttgtaaaaggttgtaacacactagcaagaggctgggttgttggtacaatttcttctacagttagattgcaagctggaactgctactgaatatgcttccaactcatctatattgtctttatgtgcgttttctgtagatcctaagaaaacgtatttagattttatacaacaaggaggaacacctattgccaattgtgttaaaatgttgtgtgaccatgctggtaccggtatggccattactgttaaacccgatgctaccactagtcaggattcatatggtggtgcgtctgtttgtatatattgccgcgcacgagttgaacacccagatgttgatgggttgtgcaaattacgcggcaagtttgtacaagtgcctgtaggtataaaagatcctgtgtcttatgttttgacacatgatgtttgtcgagtttgtggattttggcgggatggaagttgttcatgtgttagcactgacactactgttcaatcaaaagatactaattttttaaacgggttcggggtacgagtgtagatgcccgtctcgtaccctgcgccagtggtttatctactgatgtacaattaagggcatttgatatttacaatgctagtgttgctggcattggtttacatttaaaagttaattgttgccgttttcagcgtgttgatgagaacggtgataaattagatcagttctttgttgttaagaggacagatctgactatatataatagagagatgaaatgctatgagcgtgtaaaagattgtaagtttgtggctgaacacgatttctttacatttgatgtagaaggtagtcgtgtgccacacattgtacgcaaggatttaacaaagtatactatgttggatctttgctatgcattgcgacattttgatcgcaatgattgcatgctgctttgtgacattctctctatatatgctggttgtgaacaatcctactttactaagaaggattggtatgattttgttgaaaatcctgatattattaatgtgtataaaaagctaggacctatttttaatagagccctagttagcgctactgagtttgcggacaaattggtggaggtaggcttagtaggcgttttaacacttgataatcaagatttaaatggtaaatggtatgattttggtgactatgttattgcagccccaggatgtggtgttgctatagcagattcttattattcttatatcatgcctatgctgaccatgtgtcatgcattggattgcgaattgtatgtgaataatgcttatagactatttgatcttgtacagtatgattttactgattacaagcttgaattgtttaataagtattttaagcactggagtatgccatatcatcctaacactgttgattgtcaggatgatcggtgtattatacattgtgctaattttaacatactttttagtatggttttacctaatacatgttttgggcctcttgttaggcaaatttttgtggatggtgtgccttttgttgtttcaattggctaccattataaagaacttggtattgtgatgaatatggatgtggatacacatcgttatcgcttgtctttaaaagacttgcttttatatgctgctgatccagctttgcatgtagcttctgctagtgcattgtatgatttacgcacttgctgttttagtgttgccgctataacaagcggtgtaaaatttcaaacagttaaacctggtaattttaatcaggatttttatgattttgttttaagtaaaggcctgcttaaagagggtagctcagttgatctgaagcactttttctttacacaggatggtaatgctgctattactgattataattattataagtataatttgcccaccatggtggacattaagcagttgttgtttgttttggaagttgtttataagtattttgagatttatgatggtgggtgtataccggcatcacaagtcattgttaataattatgataagagtgctggctatccatttaacaaatttggaaaagccaggctctattatgaagcattatcatttgaggaacaggatgaaatttacgcttatactaagcgtaatgtcctgccaacacttactcaaatgaatttgaaatatgctattagtgctaagaatagagcccgcactgttgctggtgtttccatacttagtactatgactggcagaatgtttcatcaaaaatgtttgaaaagtatagcagctacacgtggtgttcctgtagttataggcaccactaaattttatggtggctgggatgatatgttacgccgccttattaaagatgttgacaatcctgtacttatgggttgggattatcctaagtgtgatcgtgctatgccaaacctactacgtattgttagtagtttggtattagcccgaaaacatgagacatgttgttcgcaaagcgataggttttatcgacttgcgaatgaatgcgcacaagttttgagtgaaattgttatgtgtggtggctgttattatgttaagcctggtggcactagtagtggtgatgcaactactgcttttgctaattcagtctttaacatatgtcaagctgtttcagccaatgtatgtgccttaatgtcatgcaatggcaataagattgaagatcttagtatacgtgctcttcagaagcgcttatactcacatgtgtatagaagtgataaggttgattcaacctttgtcacagaatattatgaatttttaaataagcattttagtatgatgattttgagtgatgatggggttgtgtgttataattctgattatgcgtccaaagggtatattgctaatataagtgcctttcaacaggtattatattatcaaaataacgtttttatgtcagaatccaaatgttgggttgaacatgacataaataatggacctcatgaattctgttcacaacacacaatgcttgtaaagatggatggtgacgatgtctaccttccatatcctaatcctagtcgtatattaggagctggatgttttgtagatgatttgttaaagactgatagtgttcttttaatagaacgatttgtaagtcttgcaatagatgcttatccacttgtgtatcatgaaaatgaagaataccaaaaggtttttcgtgtttatttggcgtatataaagaagttgtacaatgacctgggtaatcagatcttggatagctacagtgttattttaagtacttgtgatggacaaaagttcactgatgagtccttttacaagaacatgtatttaagaagtgcagttatgcagagtgttggagcttgcgtggtctgctcttctcaaacatcattacgttgtggcagttgcatcagaaagcctcttctttgctgcaagtgttgttatgatcatgttatggcgactgatcataaatatgtcttgagtgtttcaccatatgtgtgtaatgcaccaggatgtgatgtaaatgatgttaccaaattgtatctaggtggtatgtcatattattgtgaagaccataagccacaatattcattcaagttggtaatgaatggtctggtttttggtctatataaacaatcttgtacaggatctccgtacatagacgattttaatcgtatagctagttgtaaatggaccgatgtggatgattacatactagctaatgaatgtacagagcgcttgaaattgtttgctgcagaaacgcaaaaggcaaccgaggaagcctttaagcagagttatgcatcagcaacaatacaagagattgttagtgagcgcgaattgattctctcttgggagattggaaaagttaagccaccacttaataaaaattatgtttttactggctaccattttactaaaaatggtaagacagttttaggtgagtatgtttttgataagagtgagttgactaatggtgtgtattatcgcgccacaaccacttataagctatctgtaggagatgtttttgttttaacctctcattcagtagctaatttaagtgctcctacgcttgttccgcaggagaattatagtagtattagatttgctagtgtttatagtgtgcttgagacgtttcagaacaatgttgttaattatcaacacattggtatgaaacgttactgcaccgtgcaaggacctcctggtacagggaagtcacatcttgctattggtcttgctgtattctattgtacagcacgtgttgtatacacagcggccagccatgcagctgttgacgcattgtgtgaaaaagcatataaatttttgaatataaatgattgcactcgtattgttccggccaaggtcagggtggagtgctatgataagtttaaaattaatgacaccactcgtaagtatgtgtttactaccataaatgcattacctgagatggtgactgatattgttgttgtagatgaagttagtatgcttaccaattatgagctttctgttattaatgctcgtattcgcgctaagcattatgtttatattggtgatcctgctcaattgccagcaccacgtgtgttattgagcaagggtacacttgaacctaaatattttaacactgttactaagctcatgtgttgcttagggccagacatttttcttggtacatgttatagatgtcctaaggaaatcgttgatacagtgtccgccttggtttatgaaaataagcttaaggctaagaatgagagtagttcattgtgttttaaggtctattataagggcgttacaacacatgaaagttctagtgctgtaaatatgcagcagatttatttgattaataagtttttgaaggctaaccctttgtggcataaagctgtttttattagcccatataatagtcagaactttgcagctaagcgtgttttgggtttacaaacccaaaccgtggattctgctcaaggttctgaatatgattatgttatatattcacagactgcagaaacagcgcattctgtaaatgttaatcgcttcaatgttgctattactcgagccaagaaaggtattctttgtgttatgagtaatatgcagttgtttgaagcattacagtttactacattgaccttagataaagtgccacaggccgtcgaaactaaagttcaatgtagtactaatttatttaaagattgtagcaagagttatagcggttatcacccagctcatgctccttcatttttggcagtagatgacaaatataaggcaactggcgatttagccgtgtgtcttggtattggtgattctgctgttacatattcaagattaatatcactcatgggttttaaattggatgttacccttgatgggtattgtaagctttttataactaaagaagaagctgttaaacgcgtgcgtgcctgggttggctttgatgctgaaggtgctcatgccacgcgtgatagcattgggacaaatttcccacttcaattaggattttccacaggaattgattttgttgtggaagccactggtttgtttgctgatagagatggttacagctttaaaaaggctgtggcgaaagctcctcctggtgaacaatttaagcacctcatccctttgatgacgagaggtcatcgctgggatgttgttagacctagaatagtacaaatgtttgcagatcatttaattgatctgtctgattgtgttgtgctagttacatgggcagccaactttgagctcacttgtctccgctactttgcaaaagtagggcgtgagatttcttgtaatgtatgcactaaacgtgccacagtttacaattctagaactggttactatggttgttggcgccatagtgttacatgtgattacttgtataatccacttattgttgatattcaacagtggggatatattggttctttatcaagtaatcatgatttatattgtagtgtccataaaggagcacatgttgcttcctctgatgctataatgacacggtgtttggccgtttatgattgcttttgcaataatattaattggaatgtggagtatcccatcatttcaaatgagttaagtattaatacctcttgtagggtcttgcagcgtgtgattcttaaagctgccatgctctgcaacagatatactttgtgttatgatattggcaacccaaaagcgattgcctgtgtcaaagattttgattttaagttctatgatgcccaaccaattgttaagtctgttaagactcttttgtattcttttgaggcacataaggactcttttaaagacggtttgtgtatgttttggaactgtaatgtggataagtatccaccgaatgcagttgtatgtagatttgacactagagtgttgaataatttaaatcttcctggctgtaatggaggtagtttgtatgttaataaacatgcattccacactaaaccctttgctagggcagcctttgagcatttgaagcctatgccattcttctattattcagatacgccttgtgtgtatatggatggcatggatgctaagcaggttgattatgtacctttgaaatctgccacgtgcatcacaagatgcaatttaggtggtgcagtttgtttaaaacatgctgaagagtatcgtgagtacttagagtcttacaatacagctactacagcaggttttactttttgggtctataagacatttgatttttataatttgtggaatacgttcaccaagctacaaagcttggagaatgttgtatataatttagtcaagactggtcattatacaggacaggctggtgaaatgccttgtgccattataaatgataaagttgtggctaagatcgataaggaggatgttgtcatttttattaataatacaacataccctactaatgtggccgttgaattatttgccaagcgcagtgttcgacaccacccagagcttaagctctttagaaatttaaatatagacgtgtgttggaagcacgtcatttgggattatgctagagaaagtatattttgcagtaatacctatggtgtctgcatgtatacagatttaaagttcattgataaattgaatgtcctttttgatggtcgtgataatggtgctcttgaagcttttaaacgttctaataatggcgtttacatttccacgacaaaagttaagagtctttcgatgataagaggtccaccgcgtgctgaattaaatggcgtagtggtggacaaggttggagacactgattgtgtgttttattttgctgtgcgtaaagaaggtcaggatgtcatcttcagccaattcgacagcctgggagtcagctctaaccagagcccacaaggtaatctggggagtaatggtaaacccggtaatgtcggtggtaatgatgctctgtcaatctctactatctttacacaaagccgtgttattagctcttttacatgtcgtactgatatggaaaaagattttatagctttagatcaagatgtgtttattcagaagtatggtttggaggactatgcctttgaacacattgtttatggtaacttcaaccagaagattattggtggtttgcatttgttaataggcttgtaccgaagacagcaaacttccaatctggttgttcaggagtttgtttcatatgactccagcatacactcttattttatcactgacgagaagagtggtggtagtaagagtgtttgcactgttatagatattttgttggatgattttgtggctcttgttaagtcacttaatcttaattgtgtgagtaaggttgttaatgttaatgttgattttaaagattttcagtttatgctttggtgtaacgatgagaaagttatgactttctatcctcgtttgcaagctgcatctgactggaagcctggttattctatgcctgtattatataagtatttgaattctccaatggaaagagttagtctctggaattatgggaagccagttactttgcctacaggctgtatgatgaatgttgctaagtatactcagttatgtcaatatctgaatactacaacattagctgtacctgttaatatgcgagttttgcatttaggtgcaggttcagaaaaaggagtagcaccgggttctgcagttcttaggcagtggttgcctgctggtactattcttgtagataacgatttatacccatttgttagtgacagtgtcgctacatattttggggattgtataactttaccctttgattgtcaatgggatttgataatttctgatatgtatgaccctattactaagaacataggggagtacaatgtgagtaaagatggtttctttacatacatttgtcatatgattcgagacaagttagctctgggtggcagtgttgctataaaaataacagagttttcttggaatgcagaattatataagttaatggggtattttgcattttggactgtgttttgcacaaatgcaaatgcttcttctagtgaaggatttttaattggcataaattatttgtgtaagcccaaggttgagatagatggaaatgttatgcatgccaattatttgttttggagaaattccacagtttggaacgggggtgcttatagcctgtttgatatggctaaattcccgcttaagttggctggtactgccgtaataaatttaagagcagaccagattaatgatatggtttattcccttcttgaaaagggtaaactacttattagagatacaaataaagaagttttcgttggtgacagtttggttaatgtaatctaaactttaaaaatggctgtcgcttatgcagacaagcctaatcattttatcaattttccacttacccattttcagggttttgtgttaaattataaaggtttacaatttcaaattctcgatgaaggagtggattgtaaaatacaaacagcgccacacattagtcttactatgctggacatacagcctgaagactataaaagtgttgatgtcgctattcaagaagttattgatgatatgcattggggtgatggttttcagattaaatttgagaatcctcacatcctaggaagatgcatagttttagatgttaaaggtgtagaagaattgcatgacgatttagttaattacattcgtgataaaggttgtgttgctgaccaatccaggaaatggattggccattgcaccatagctcaactcacggatgcagcactgtccattaaggaaaatgttgattttataaacagcatgcaattcaattataaaatcaccatcaacccctcatcaccggctagacttgaaatagttaagctcggtgctgaaaagaaagatggtttttatgaaaccatagttagtcactggatgggaattcgttttgaatacacatcacccactgataagctagctatgattatgggttattgttgtttagatgtggtacgtaaagagctagaagaaggcgatcttcccgagaatgatgatgatgcttggtttaagctatcgtaccattatgaaaacaattcttggttcttccgacatgtctacaggaaaagttttcatttccgtaaggcttgtcaaaatttagattgtaattgtttggggttttatgaatcttcagttgaagaatattaaactcagtgaaaatgtttttgcttcctagatttattctagttagctgcataattggtagcttaggtttttacaaccctcctaccaatgttgtttcgcatgtaaatggagattggtttttatttggtgacagtcgttcagattgtaatcatattgttaatatcaacccccataattattcttatatggaccttaatcctgttctgtgtgattctggtaaaatatcatctaaagctggcaactccatttttaggagttttcactttaccgatttttataattacacaggcgaaggtcaacaaattattttttatgagggtgttaattttacgccttatcatgcctttaaatgcaaccgttctggtagtaatgatatttggatgcagaataaaggcttgttttatactcaggtttataagaatatggctgtgtatcgcagccttacttttgttaatgtaccatatgtttataatggctccgcacaagctacagctctttgtaaatctggtagtttagtccttaataaccctgcatatatagctcctcaagctaactctggggattattattataaggttgaagctgatttttatttgtcaggttgtgacgagtatatcgtaccactttgtatttttaacggcaagtttttgtcgaatacaaagtattatgatgatagtcaatattattttaataaagacactggtgttatttatggtctcaattctacagaaaccattaccactggttttgatcttaattgttattatttagttttaccctctggtaattatttagccatttcaaatgagctattgttaactgttcctacgaaagcaatctgtcttaataagcgtaaggattttacgcctgtacaggttgttgattcgcggtggaacaatgccaggcagtctgataacatgacggcggttgcttgtcaacctccgtactgttattttcgtaattctactaccaactatgttggtgtttatgatattaatcatggagatgctggttttactagcatacttagtggtttgttatataattcaccttgtttttcgcagcaaggcgtttttaggtatgataatgttagcagtgtctggcctctctacccctatggcagatgtcccactgctgctgatattaatatccctgatttacccatttgtgtgtatgatccgctaccagttattttgcttggcattcttttgggcgttgcgattgtaattattgtagttttgttgttatattttatggtggataatgttactaggctgcatgatgcttagaccataatctaaacatgtttttgatacttttaatttccttaccaacggcttttgctgttataggagatttaaagtgtacttcagataatattaatgataaagacaccggtcctcctcctataagtactgatactgttgatgttactaatggtttgggtacttattatgttttagatcgtgtgtatttaaatactacgttgtttcttaatggttattaccctacttcaggttccacatatcgtaatatggcactgaagggaagtgtactattgagcagactatggtttaaaccaccatttctttctgattttattaatggtatttttgctaaggtcaaaaataccaaggttattaaagatcgtgtaatgtatagtgagttccctgctataactataggtagtacttttgtaaatacatcctatagtgtggtagtacaaccacgtacaatcaattcaacacaggatggtgataataaattacaaggtcttttagaggtctctgtttgccagtataatatgtgcgagtacccacaaacgatttgtcatcctaacctgggtaatcatcgcaaagaactatggcatttggatacaggtgttgtttcctgtttatataagcgtaatttcacatatgatgtgaatgctgattatttgtattttcatttttatcaagaaggtggtactttttatgcatattttacagacactggtgttgttactaagtttttgtttaatgtttatttaggcatggcgctttcacactattatgtcatgcctctgacttgtaatagtaagcttactttagaatattgggttacacctctcacttctagacaatatttactcgctttcaatcaagatggtattatttttaatgctgttgattgtatgagtgattttatgagtgagattaagtgtaaaacacaatctatagcaccacctactggtgtttatgaattaaacggttacactgttcagccaatcgcagatgtttaccgacgtaaacctaatcttcccaattgcaatatagaagcttggcttaatgataagtcggtgccctctccattaaattgggaacgtaagacattttcaaattgtaattttaatatgagcagcctgatgtcttttattcaggcagactcatttacttgtaataatattgatgctgctaagatatatggtatgtgtttttccagcataactatagataagtttgctatacccaatggcaggaaggttgacctacaattgggtaatttgggctatttgcagtcatttaactatagaattgatactactgcaacaagttgtcagttgtattataatttacctgctgctaatgtttctgttagcaggtttaatccttctacttggaataagagatttggttttatagaagattctgtttttaagcctcgacctgcaggtgttcttactaatcatgatgtagtttatgcacaacactgtttcaaagctcctaaaaatttctgtccgtgtaaattgaatggttcgtgtgtaggtagtggtcctggtaaaaataatggtataggcacttgtcctgcaggtactaattatttaacttgtgataatttgtgcactcctgatcctattacatttacaggtacttataagtgcccccaaactaaatctttagttggcataggtgagcactgttcgggtcttgctgttaaaagtgattattgtggaggcaattcttgtacttgccgaccacaagcatttttgggttggtctgcagactcttgtttacaaggagacaagtgtaatatttttgctaattttattttgcatgatgttaatagtggtcttacttgttctactgatttacaaaaagctaacacagacataattcttggtgtttgtgttaattatgacctctatggtattttaggccaaggcatttttgttgaggttaatgcgacttattataatagttggcagaaccttttatatgattctaatggtaatctctacggttttagagactacataacaaacagaacttttatgattcgtagttgctatagcggtcgtgtttctgcggcctttcacgctaactcttccgaaccagcattgctatttcggaatattaaatgcaactacgtttttaataatagtcttacacgacagctgcaacccattaactattttgatagttatcttggttgtgttgtcaatgcttataatagtactgctatttctgttcaaacatgtgatctcacagtaggtagtggttactgtgtggattactctaaaaacagacgaagtcgtggagcgattaccactggttatcggtttactaattttgagccatttactgttaattcagtaaacgatagtttagaacctgtaggtggtttgtatgaaattcaaataccttcagagtttactataggtaatatggtggagtttattcaaacaagctctcctaaagttactattgattgtgctgcatttgtctgtggtgattatgcagcatgtaaatcacagttggttgaatatggtagtttctgtgataacattaatgccatactcacagaagtaaatgaactacttgacactacacagttgcaagtagctaatagtttaatgaatggtgttactcttagcactaagcttaaagatggcgttaatttcaatgtagacgacatcaatttttcccctgtattaggttgtctaggcagcgaatgtagtaaagcttccagtagatctgctatagaggatttactttttgataaagtaaagttatctgatgtcggttttgttgaggcttataataattgtacaggaggtgccgaaattagggacctcatttgtgtgcaaagttataaaggcatcaaagtgttgcctccactgctctcagaaaatcagatcagtggatacactttggctgccacctctgctagtctatttcctccttggacagcagcagcaggtgtaccattttatttaaatgttcagtatcgcattaatgggcttggtgtcaccatggatgtgctaagtcaaaatcaaaagcttattgctaatgcatttaacaatgccctttatgctattcaggaagggttcgatgcaactaattctgctttagttaaaattcaagctgttgttaatgcaaatgctgaagctcttaataacttattgcaacaactctctaatagatttggtgctataagtgcttctttacaagaaattctatctagacttgatgctcttgaagcggaagctcagatagatagacttattaatggtcgtcttaccgctcttaatgcttatgtttctcaacagcttagtgattctacactggtaaaatttagtgcagcacaagctatggagaaggttaatgaatgtgtcaaaagccaatcatctaggataaatttctgtggtaatggtaatcatattatatcattagtgcagaatgctccatatggtttgtattttatccactttagttatgtccctactaagtatgtcacagcgagggttagtcctggtctgtgcattgctggtgatagaggtatagctcctaagagtggttattttgttaatgtaaataatacttggatgtacactggtagtggttactactaccctgaacctataactgaaaataatgttgttgttatgagtacctgcgctgttaattatactaaagcgccgtatgtaatgctgaacacttcaatacccaaccttcctgattttaaggaagagttggatcaatggtttaaaaatcaaacatcagtggcaccagatttgtcacttgattatataaatgttacattcttggacctacaagttgaaatgaataggttacaggaggcaataaaagtcttaaatcagagctacatcaatctcaaggacattggtacatatgaatattatgtaaaatggccttggtatgtatggcttttaatctgccttgctggtgtagctatgcttgttttactattcttcatatgctgttgtacaggatgtgggactagttgttttaagaaatgtggtggttgttgtgatgattatactggataccaggagttagtaatcaaaacttcacatgacgactaagttcgtctttgattcattgcactgatctcttgttagatctttttgcaatctagcatttgttaaagttcttaaggccacgccctattaatggacatttggagacctgagaagaaatatctccgttatattaacggttttaatgtctcagaattagaagatgcttgttttaaatttaactatcaatttcctaaagtaggatattgtagagttcctagtcatgcttggtgccgtaatcaaggtagattttgtgctacattcactctttatggtaaatccaaacattatgataaatattttggagtaataaatggtttcacagcattcgctaatactgtagaggatgctgttaacaaactggttttcttagctgttgactttattacctggcgcagacaggagttaaatgtttatggctgatgcttatcttgcagacactgtgtggtatgtggggcaaataatttttatagttgccatttgtttattggttacaatagttgtagtggcatttttggcaacttttaaattgtgtattcaactttgcggtatgtgtaataccttagtactgtccccttctatttatgtgtttaatagaggtaggcagttttatgagttttacaatgatgtaaaaccaccagtccttgatgtggatgacgtttaggtaatccaaacattatgagtagtaaaactacaccagcaccagtttatatctggactgctgatgaagctattaaattcctaaaggaatggaatttttctttgggtattatactactttttattacaatcatattgcaatttggatatacaagtcgcagtatgtttgtttatgttattaagatgattattttgtggcttatgtggccccttactataatcttaactattttcaattgcgtatacgcattgaataatgtgtatcttggcctttctatagtttttaccatagtggccattattatgtggattgtgtattttgtgaatagtatcaggttgtttattagaactggaagtttttggagtttcaacccagaaacaaacaacttgatgtgtatagatatgaaaggaacaatgtatgttaggccgataattgaggactatcatactctgacggtcacaataatacgcggccatctttacattcaaggtataaaactaggtactggctattctttggcagatttgccagcttatatgactgttgctaaggttacacacctgtgcacatataagcgtggttttcttgacaggataagcgatactagtggttttgctgtttatgttaagtccaaagtcggtaattaccgactgccatcaacccaaaagggttctggcatggacaccgcattgttgagaaataatatctaaattttaaggatgtcttttactcctggtaagcaatccagtagtagagcgtcctctggaaatcgttctggtaatggcatcctcaagtgggccgatcagtccgaccagtttagaaatgttcaaaccaggggtagaagagctcaacccaagcaaactgctacctctcagcaaccatcaggagggaatgttgtaccctactattcttggttctctggaattactcagtttcaaaagggaaaggagtttgagtttgtagaaggacaaggtgtgcctattgcaccaggagtcccagctactgaagctaaggggtactggtacagacacaacagacgttcttttaaaacagccgatggcaaccagcgtcaactgctgccacgatggtatttttactatctgggaacaggaccgcatgctaaagaccagtacggcaccgatattgacggagtctactgggtcgctagcaaccaggctgatgtcaataccccggctgacattgtcgatcgggacccaagtagcgatgaggctattccgactaggtttccgcctggcacggtactccctcagggttactatattgaaggctcaggaaggtctgctcctaattccagatctacttcgcgcacatccagcagagcctctagtgcaggatcgcgtagtagagccaattctggcaatagaacccctacctctggtgtaacacctgacatggctgatcaaattgctagtcttgttctggcaaaacttggcaaggatgccactaaacctcagcaagtaactaagcatactgccaaagaagtcagacagaaaattttgaataagccccgccagaagaggagccccaataaacaatgcactgttcagcagtgttttggtaagagaggccctaatcagaattttggtggtggagaaatgttaaaacttggaactagtgacccacagttccccattcttgcagaactcgcacccacagctggtgcgtttttctttggatcaagattagagttggccaaagtgcagaatttatctgggaatcctgacgagccccagaaggatgtttatgaattgcgctataacggcgcaattaggtttgacagtacactttcaggttttgagaccataatgaaggtgctgaatgagaatttgaatgcctatcaacaacaagatggtatgatgaatatgagtccaaaaccacagcgtcagcgtggtcataagaatggacaaggagaaaatgataatataagtgttgcagtgcccaaaagccgcgtgcagcaaaataagagtagagagttgactgcagaggacatcagccttcttaagaagatggatgagccctatactgaagacacctcagaaatataagagaatgaaccttatgtcggcatctggtggtaacccctcgcagaaaagtcgagataaggcactctctatcagaatggatgtcttgctgctataatagatagagaaggttatagcagactatagattaattagttgaaagttttgtgttgtaatgtatagtgttggagaaagtgaaagacttgcggaagtaattgccgacaagtgcccaagggaagagccagcatgttaagttaccacccagtaattagtaaatgaatgaagttaattatggccaattggaagaatcacaaaaaaaaaaaaaaaaaaaaaaaaaaaa

SEQ ID NO: 2411 - DNA, 21 bp, Severe acute respiratory syndrome coronavirus 2
gacgaatgccaaagcaggcac

SEQ ID NO: 2412 - DNA, 21 bp, Severe acute respiratory syndrome coronavirus 2
acgaatgccaaagcaggcaca

SEQ ID NO: 2413 - DNA, 21 bp, Severe acute respiratory syndrome coronavirus 2
cgaatgccaaagcaggcacaa

SEQ ID NO: 2414 - DNA, 21 bp, Severe acute respiratory syndrome coronavirus 2
gaatgccaaagcaggcacaac

SEQ ID NO: 2415 - DNA, 21 bp, Severe acute respiratory syndrome coronavirus 2
aatgccaaagcaggcacaacg

SEQ ID NO: 2416 - DNA, 21 bp, Severe acute respiratory syndrome coronavirus 2
atgccaaagcaggcacaacgt

SEQ ID NO: 2417 - DNA, 21 bp, Severe acute respiratory syndrome coronavirus 2
tgccaaagcaggcacaacgtc

SEQ ID NO: 2418 - DNA, 21 bp, Severe acute respiratory syndrome coronavirus 2
gatccaaagcaggcccacact

SEQ ID NO: 2419 - DNA, 21 bp, Severe acute respiratory syndrome coronavirus 2
atccaaagcaggcccacactg

SEQ ID NO: 2420 - DNA, 21 bp, Severe acute respiratory syndrome coronavirus 2
tccaaagcaggcccacactgg

SEQ ID NO: 2421 - DNA, 21 bp, Severe acute respiratory syndrome coronavirus 2
ccaaagcaggcccacactggc

SEQ ID NO: 2422 - DNA, 21 bp, Severe acute respiratory syndrome coronavirus 2
caaagcaggcccacactggct

SEQ ID NO: 2423 - DNA, 21 bp, Severe acute respiratory syndrome coronavirus 2
aaagcaggcccacactggctt

SEQ ID NO: 2424 - DNA, 21 bp, Severe acute respiratory syndrome coronavirus 2
aagcaggcccacactggcttt

SEQ ID NO: 2425 - DNA, 21 bp, Severe acute respiratory syndrome coronavirus 2
agcaggcccacactggctttc

SEQ ID NO: 2426 - DNA, 21 bp, Severe acute respiratory syndrome coronavirus 2
gcaggcccacactggctttcc

SEQ ID NO: 2427 - DNA, 21 bp, Severe acute respiratory syndrome coronavirus 2
caggcccacactggctttcca

SEQ ID NO: 2428 - DNA, 21 bp, Severe acute respiratory syndrome coronavirus 2
aggcccacactggctttccat

SEQ ID NO: 2429 - DNA, 21 bp, Severe acute respiratory syndrome coronavirus 2
ggcccacactggctttccatt

SEQ ID NO: 2430 - DNA, 21 bp, Severe acute respiratory syndrome coronavirus 2
gcccacactggctttccattc

SEQ ID NO: 2431 - DNA, 21 bp, Severe acute respiratory syndrome coronavirus 2
cccacactggctttccattct

SEQ ID NO: 2432 - DNA, 21 bp, Severe acute respiratory syndrome coronavirus 2
ccacactggctttccattcta

SEQ ID NO: 2433 - DNA, 21 bp, Severe acute respiratory syndrome coronavirus 2
cacactggctttccattctac

SEQ ID NO: 2434 - DNA, 21 bp, Severe acute respiratory syndrome coronavirus 2
acactggctttccattctacc

SEQ ID NO: 2435 - DNA, 21 bp, Severe acute respiratory syndrome coronavirus 2
cactggctttccattctacct

SEQ ID NO: 2436 - DNA, 21 bp, Severe acute respiratory syndrome coronavirus 2
actggctttccattctacctc

SEQ ID NO: 2437 - DNA, 21 bp, Severe acute respiratory syndrome coronavirus 2
ctggctttccattctacctct

SEQ ID NO: 2438 - DNA, 21 bp, Severe acute respiratory syndrome coronavirus 2
tggctttccattctacctctc

SEQ ID NO: 2439 - DNA, 21 bp, Severe acute respiratory syndrome coronavirus 2
ggctttccattctacctctcg

SEQ ID NO: 2440 - DNA, 21 bp, Severe acute respiratory syndrome coronavirus 2
gctttccattctacctctcgg

SEQ ID NO: 2441 - DNA, 21 bp, Severe acute respiratory syndrome coronavirus 2
ctttccattctacctctcgga

SEQ ID NO: 2442 - DNA, 21 bp, Severe acute respiratory syndrome coronavirus 2
tttccattctacctctcggaa

SEQ ID NO: 2443 - DNA, 21 bp, Severe acute respiratory syndrome coronavirus 2
ttccattctacctctcggaac

SEQ ID NO: 2444 - DNA, 21 bp, Severe acute respiratory syndrome coronavirus 2
tccattctacctctcggaaca

SEQ ID NO: 2445 - DNA, 21 bp, Severe acute respiratory syndrome coronavirus 2
agttgctcttttgtgtgcagg

SEQ ID NO: 2446 - DNA, 21 bp, Severe acute respiratory syndrome coronavirus 2
gttgctcttttgtgtgcaggt

SEQ ID NO: 2447 - DNA, 21 bp, Severe acute respiratory syndrome coronavirus 2
ttgctcttttgtgtgcaggtt

SEQ ID NO: 2448 - DNA, 21 bp, Severe acute respiratory syndrome coronavirus 2
tgctcttttgtgtgcaggttg

SEQ ID NO: 2449 - DNA, 21 bp, Severe acute respiratory syndrome coronavirus 2
gctcttttgtgtgcaggttga

SEQ ID NO: 2450 - DNA, 21 bp, Severe acute respiratory syndrome coronavirus 2
ctcttttgtgtgcaggttgag

SEQ ID NO: 2451 - DNA, 21 bp, Severe acute respiratory syndrome coronavirus 2
tcttttgtgtgcaggttgagt

SEQ ID NO: 2452 - DNA, 21 bp, Severe acute respiratory syndrome coronavirus 2
cttttgtgtgcaggttgagtc

SEQ ID NO: 2453 - DNA, 21 bp, Severe acute respiratory syndrome coronavirus 2
ttttgtgtgcaggttgagtca

SEQ ID NO: 2454 - DNA, 21 bp, Severe acute respiratory syndrome coronavirus 2
tttgtgtgcaggttgagtcaa

SEQ ID NO: 2455 - DNA, 21 bp, Severe acute respiratory syndrome coronavirus 2
ttgtgtgcaggttgagtcaaa

SEQ ID NO: 2456 - DNA, 21 bp, Severe acute respiratory syndrome coronavirus 2
tgtgtgcaggttgagtcaaac

SEQ ID NO: 2457 - DNA, 21 bp, Severe acute respiratory syndrome coronavirus 2
gtgtgcaggttgagtcaaacg

SEQ ID NO: 2458 - DNA, 21 bp, Severe acute respiratory syndrome coronavirus 2
tgtgcaggttgagtcaaacgg

SEQ ID NO: 2459 - DNA, 21 bp, Severe acute respiratory syndrome coronavirus 2
gtgcaggttgagtcaaacgga

SEQ ID NO: 2460 - DNA, 21 bp, Severe acute respiratory syndrome coronavirus 2
tgcaggttgagtcaaacggac

SEQ ID NO: 2461 - DNA, 21 bp, Severe acute respiratory syndrome coronavirus 2
gcaggttgagtcaaacggaca

SEQ ID NO: 2462 - DNA, 21 bp, Severe acute respiratory syndrome coronavirus 2
gaacttgtcgggatacacaag

SEQ ID NO: 2463 - DNA, 21 bp, Severe acute respiratory syndrome coronavirus 2
aacttgtcgggatacacaagt

SEQ ID NO: 2464 - DNA, 21 bp, Severe acute respiratory syndrome coronavirus 2
acttgtcgggatacacaagta

SEQ ID NO: 2465 - DNA, 21 bp, Severe acute respiratory syndrome coronavirus 2
caagaagaagcattcttgcca

SEQ ID NO: 2466 - DNA, 21 bp, Severe acute respiratory syndrome coronavirus 2
aagaagaagcattcttgccat

SEQ ID NO: 2467 - DNA, 21 bp, Severe acute respiratory syndrome coronavirus 2
agaagaagcattcttgccatt

SEQ ID NO: 2468 - DNA, 21 bp, Severe acute respiratory syndrome coronavirus 2
gaagaagcattcttgccatta

SEQ ID NO: 2469 - DNA, 21 bp, Severe acute respiratory syndrome coronavirus 2
aagaagcattcttgccattat

SEQ ID NO: 2470 - DNA, 21 bp, Severe acute respiratory syndrome coronavirus 2
agaagcattcttgccattatt

SEQ ID NO: 2471 - DNA, 21 bp, Severe acute respiratory syndrome coronavirus 2
accaataaattttgaatgact

SEQ ID NO: 2472 - DNA, 21 bp, Severe acute respiratory syndrome coronavirus 2
ccaataaattttgaatgactg

SEQ ID NO: 2473 - DNA, 21 bp, Severe acute respiratory syndrome coronavirus 2
caataaattttgaatgactgt

SEQ ID NO: 2474 - DNA, 21 bp, Severe acute respiratory syndrome coronavirus 2
aataaattttgaatgactgtt

SEQ ID NO: 2475 - DNA, 21 bp, Severe acute respiratory syndrome coronavirus 2
ataaattttgaatgactgtta

SEQ ID NO: 2476 - DNA, 21 bp, Severe acute respiratory syndrome coronavirus 2
taaattttgaatgactgttac

SEQ ID NO: 2477 - DNA, 21 bp, Severe acute respiratory syndrome coronavirus 2
aaattttgaatgactgttaca

SEQ ID NO: 2478 - DNA, 21 bp, Severe acute respiratory syndrome coronavirus 2
gagacttcttcatcacctttt

SEQ ID NO: 2479 - DNA, 21 bp, Severe acute respiratory syndrome coronavirus 2
agacttcttcatcacctttta

SEQ ID NO: 2480 - DNA, 21 bp, Severe acute respiratory syndrome coronavirus 2
gacttcttcatcaccttttag

SEQ ID NO: 2481 - DNA, 21 bp, Severe acute respiratory syndrome coronavirus 2
acttcttcatcaccttttagg

SEQ ID NO: 2482 - DNA, 21 bp, Severe acute respiratory syndrome coronavirus 2
cttcttcatcaccttttagga

SEQ ID NO: 2483 - DNA, 21 bp, Severe acute respiratory syndrome coronavirus 2
ttcttcatcaccttttaggat

SEQ ID NO: 2484 - DNA, 21 bp, Severe acute respiratory syndrome coronavirus 2
tcttcatcaccttttaggatg

SEQ ID NO: 2485 - DNA, 21 bp, Severe acute respiratory syndrome coronavirus 2
cttcatcaccttttaggatgg

SEQ ID NO: 2486 - DNA, 21 bp, Severe acute respiratory syndrome coronavirus 2
cacttttgatggcttcaacat

SEQ ID NO: 2487 - DNA, 21 bp, Severe acute respiratory syndrome coronavirus 2
acttttgatggcttcaacatc

SEQ ID NO: 2488 - DNA, 21 bp, Severe acute respiratory syndrome coronavirus 2
cttttgatggcttcaacatcc

SEQ ID NO: 2489 - DNA, 21 bp, Severe acute respiratory syndrome coronavirus 2
agtacaccatcacaaccaaaa

SEQ ID NO: 2490 - DNA, 21 bp, Severe acute respiratory syndrome coronavirus 2
gtacaccatcacaaccaaaat

SEQ ID NO: 2491 - DNA, 21 bp, Severe acute respiratory syndrome coronavirus 2
tacaccatcacaaccaaaatt

SEQ ID NO: 2492 - DNA, 21 bp, Severe acute respiratory syndrome coronavirus 2
acaccatcacaaccaaaattg

SEQ ID NO: 2493 - DNA, 21 bp, Severe acute respiratory syndrome coronavirus 2
caccatcacaaccaaaattgt

SEQ ID NO: 2494 - DNA, 21 bp, Severe acute respiratory syndrome coronavirus 2
accatcacaaccaaaattgta

SEQ ID NO: 2495 - DNA, 21 bp, Severe acute respiratory syndrome coronavirus 2
caaataacaaagaatccgata

SEQ ID NO: 2496 - DNA, 21 bp, Severe acute respiratory syndrome coronavirus 2
aaataacaaagaatccgataa

SEQ ID NO: 2497 - DNA, 21 bp, Severe acute respiratory syndrome coronavirus 2
aggtacgtcccacgacatctg

SEQ ID NO: 2498 - DNA, 21 bp, Severe acute respiratory syndrome coronavirus 2
ggtacgtcccacgacatctgt

SEQ ID NO: 2499 - DNA, 21 bp, Severe acute respiratory syndrome coronavirus 2
gtacgtcccacgacatctgta

SEQ ID NO: 2500 - DNA, 21 bp, Severe acute respiratory syndrome coronavirus 2
agaaacttacaccgatttaga

SEQ ID NO: 2501 - DNA, 21 bp, Severe acute respiratory syndrome coronavirus 2
gaaacttacaccgatttagac

SEQ ID NO: 2502 - DNA, 21 bp, Severe acute respiratory syndrome coronavirus 2
aaacttacaccgatttagact

SEQ ID NO: 2503 - DNA, 21 bp, Severe acute respiratory syndrome coronavirus 2
tttacccgatctaagggattc

SEQ ID NO: 2504 - DNA, 21 bp, Severe acute respiratory syndrome coronavirus 2
ttacccgatctaagggattct

SEQ ID NO: 2505 - DNA, 21 bp, Severe acute respiratory syndrome coronavirus 2
tacccgatctaagggattctc

SEQ ID NO: 2506 - DNA, 21 bp, Severe acute respiratory syndrome coronavirus 2
acccgatctaagggattctca

SEQ ID NO: 2507 - DNA, 21 bp, Severe acute respiratory syndrome coronavirus 2
cccgatctaagggattctcac

SEQ ID NO: 2508 - DNA, 21 bp, Severe acute respiratory syndrome coronavirus 2
ccgatctaagggattctcact

SEQ ID NO: 2509 - DNA, 21 bp, Severe acute respiratory syndrome coronavirus 2
cgatctaagggattctcacta

SEQ ID NO: 2510 - DNA, 21 bp, Severe acute respiratory syndrome coronavirus 2
gatctaagggattctcactac

SEQ ID NO: 2511 - DNA, 21 bp, Severe acute respiratory syndrome coronavirus 2
atctaagggattctcactacc

SEQ ID NO: 2512 - DNA, 21 bp, Severe acute respiratory syndrome coronavirus 2
gtcttgaccttggtggaacat

SEQ ID NO: 2513 - DNA, 21 bp, Severe acute respiratory syndrome coronavirus 2
tcttgaccttggtggaacatc

SEQ ID NO: 2514 - DNA, 21 bp, Severe acute respiratory syndrome coronavirus 2
cttgaccttggtggaacatcc

SEQ ID NO: 2515 - DNA, 21 bp, Severe acute respiratory syndrome coronavirus 2
ttgaccttggtggaacatcca

SEQ ID NO: 2516 - DNA, 21 bp, Severe acute respiratory syndrome coronavirus 2
tgaccttggtggaacatccaa

SEQ ID NO: 2517 - DNA, 21 bp, Severe acute respiratory syndrome coronavirus 2
gaccttggtggaacatccaaa

SEQ ID NO: 2518 - DNA, 21 bp, Severe acute respiratory syndrome coronavirus 2
accttggtggaacatccaaac

SEQ ID NO: 2519 - DNA, 21 bp, Severe acute respiratory syndrome coronavirus 2
ccttggtggaacatccaaaca

SEQ ID NO: 2520 - DNA, 21 bp, Severe acute respiratory syndrome coronavirus 2
cttggtggaacatccaaacaa

SEQ ID NO: 2521 - DNA, 21 bp, Severe acute respiratory syndrome coronavirus 2
ttggtggaacatccaaacaat

SEQ ID NO: 2522 - DNA, 21 bp, Severe acute respiratory syndrome coronavirus 2
tggtggaacatccaaacaatg

SEQ ID NO: 2523 - DNA, 21 bp, Severe acute respiratory syndrome coronavirus 2
ggtggaacatccaaacaatgt

SEQ ID NO: 2524 - DNA, 21 bp, Severe acute respiratory syndrome coronavirus 2
gtggaacatccaaacaatgtc

SEQ ID NO: 2525 - DNA, 21 bp, Severe acute respiratory syndrome coronavirus 2
tggaacatccaaacaatgtct

SEQ ID NO: 2526 - DNA, 21 bp, Severe acute respiratory syndrome coronavirus 2
ggaacatccaaacaatgtctg

SEQ ID NO: 2527 - DNA, 21 bp, Severe acute respiratory syndrome coronavirus 2
gaacatccaaacaatgtctgt

SEQ ID NO: 2528 - DNA, 21 bp, Severe acute respiratory syndrome coronavirus 2
aacatccaaacaatgtctgtg

SEQ ID NO: 2529 - DNA, 21 bp, Severe acute respiratory syndrome coronavirus 2
acatccaaacaatgtctgtgt

SEQ ID NO: 2530 - DNA, 21 bp, Severe acute respiratory syndrome coronavirus 2
catccaaacaatgtctgtgtg

SEQ ID NO: 2531 - DNA, 21 bp, Severe acute respiratory syndrome coronavirus 2
atccaaacaatgtctgtgtgg

SEQ ID NO: 2532 - DNA, 21 bp, Severe acute respiratory syndrome coronavirus 2
atttgttggatttatctccat

SEQ ID NO: 2533 - DNA, 21 bp, Severe acute respiratory syndrome coronavirus 2
tttgttggatttatctccata

SEQ ID NO: 2534 - DNA, 21 bp, Severe acute respiratory syndrome coronavirus 2
ttgttggatttatctccatac

SEQ ID NO: 2535 - DNA, 21 bp, Severe acute respiratory syndrome coronavirus 2
tgttggatttatctccatacc

SEQ ID NO: 2536 - DNA, 21 bp, Severe acute respiratory syndrome coronavirus 2
gttggatttatctccatacca

SEQ ID NO: 2537 - DNA, 21 bp, Severe acute respiratory syndrome coronavirus 2
ttctacaacacatgtgtgtga

SEQ ID NO: 2538 - DNA, 21 bp, Severe acute respiratory syndrome coronavirus 2
tctacaacacatgtgtgtgac

SEQ ID NO: 2539 - DNA, 21 bp, Severe acute respiratory syndrome coronavirus 2
ctacaacacatgtgtgtgacc

SEQ ID NO: 2540 - DNA, 21 bp, Severe acute respiratory syndrome coronavirus 2
tacaacacatgtgtgtgacca

SEQ ID NO: 2541 - DNA, 21 bp, Severe acute respiratory syndrome coronavirus 2
acaacacatgtgtgtgaccat

SEQ ID NO: 2542 - DNA, 21 bp, Severe acute respiratory syndrome coronavirus 2
caacacatgtgtgtgaccatg

SEQ ID NO: 2543 - DNA, 21 bp, Severe acute respiratory syndrome coronavirus 2
tttgtgtcagacatggcagac

SEQ ID NO: 2544 - DNA, 21 bp, Severe acute respiratory syndrome coronavirus 2
ttgtgtcagacatggcagacg

SEQ ID NO: 2545 - DNA, 21 bp, Severe acute respiratory syndrome coronavirus 2
tgtgtcagacatggcagacgc

SEQ ID NO: 2546 - DNA, 21 bp, Severe acute respiratory syndrome coronavirus 2
gtgtcagacatggcagacgcc

SEQ ID NO: 2547 - DNA, 21 bp, Severe acute respiratory syndrome coronavirus 2
tacacctttccaataccgaca

SEQ ID NO: 2548 - DNA, 21 bp, Severe acute respiratory syndrome coronavirus 2
acacctttccaataccgacat

SEQ ID NO: 2549 - DNA, 21 bp, Severe acute respiratory syndrome coronavirus 2
cacctttccaataccgacatc

SEQ ID NO: 2550 - DNA, 21 bp, Severe acute respiratory syndrome coronavirus 2
acctttccaataccgacatca

SEQ ID NO: 2551 - DNA, 21 bp, Severe acute respiratory syndrome coronavirus 2
cctttccaataccgacatcaa

SEQ ID NO: 2552 - DNA, 21 bp, Severe acute respiratory syndrome coronavirus 2
ctttccaataccgacatcaac

SEQ ID NO: 2553 - DNA, 21 bp, Severe acute respiratory syndrome coronavirus 2
tttccaataccgacatcaaca

SEQ ID NO: 2554 - DNA, 21 bp, Severe acute respiratory syndrome coronavirus 2
ttccaataccgacatcaacac

SEQ ID NO: 2555 - DNA, 21 bp, Severe acute respiratory syndrome coronavirus 2
tccaataccgacatcaacact

SEQ ID NO: 2556 - DNA, 21 bp, Severe acute respiratory syndrome coronavirus 2
gcaaaaatttgcccaaacgcc

SEQ ID NO: 2557 - DNA, 21 bp, Severe acute respiratory syndrome coronavirus 2
caaaaatttgcccaaacgcca

SEQ ID NO: 2558 - DNA, 21 bp, Severe acute respiratory syndrome coronavirus 2
aaaaatttgcccaaacgccac

SEQ ID NO: 2559 - DNA, 21 bp, Severe acute respiratory syndrome coronavirus 2
aaaatttgcccaaacgccaca

SEQ ID NO: 2560 - DNA, 21 bp, Severe acute respiratory syndrome coronavirus 2
aaatttgcccaaacgccacat

SEQ ID NO: 2561 - DNA, 21 bp, Severe acute respiratory syndrome coronavirus 2
aatttgcccaaacgccacatt

SEQ ID NO: 2562 - DNA, 21 bp, Severe acute respiratory syndrome coronavirus 2
atttgcccaaacgccacattc

SEQ ID NO: 2563 - DNA, 21 bp, Severe acute respiratory syndrome coronavirus 2
tttgcccaaacgccacattca

SEQ ID NO: 2564 - DNA, 21 bp, Severe acute respiratory syndrome coronavirus 2
ttgcccaaacgccacattcac

SEQ ID NO: 2565 - DNA, 21 bp, Severe acute respiratory syndrome coronavirus 2
tgcccaaacgccacattcacg

SEQ ID NO: 2566 - DNA, 21 bp, Severe acute respiratory syndrome coronavirus 2
gcccaaacgccacattcacgt

SEQ ID NO: 2567 - DNA, 21 bp, Severe acute respiratory syndrome coronavirus 2
cccaaacgccacattcacgtc

SEQ ID NO: 2568 - DNA, 21 bp, Severe acute respiratory syndrome coronavirus 2
ccaaacgccacattcacgtcg

SEQ ID NO: 2569 - DNA, 21 bp, Severe acute respiratory syndrome coronavirus 2
caaacgccacattcacgtcgg

SEQ ID NO: 2570 - DNA, 21 bp, Severe acute respiratory syndrome coronavirus 2
aaacgccacattcacgtcggg

SEQ ID NO: 2571 - DNA, 21 bp, Severe acute respiratory syndrome coronavirus 2
aacgccacattcacgtcgggc

SEQ ID NO: 2572 - DNA, 21 bp, Severe acute respiratory syndrome coronavirus 2
acgccacattcacgtcgggca

SEQ ID NO: 2573 - DNA, 21 bp, Severe acute respiratory syndrome coronavirus 2
cgccacattcacgtcgggcag

SEQ ID NO: 2574 - DNA, 21 bp, Severe acute respiratory syndrome coronavirus 2
gccacattcacgtcgggcaga

SEQ ID NO: 2575 - DNA, 21 bp, Severe acute respiratory syndrome coronavirus 2
ccacattcacgtcgggcagaa

SEQ ID NO: 2576 - DNA, 21 bp, Severe acute respiratory syndrome coronavirus 2
cacattcacgtcgggcagaat

SEQ ID NO: 2577 - DNA, 21 bp, Severe acute respiratory syndrome coronavirus 2
acattcacgtcgggcagaatg

SEQ ID NO: 2578 - DNA, 21 bp, Severe acute respiratory syndrome coronavirus 2
cattcacgtcgggcagaatgt

SEQ ID NO: 2579 - DNA, 21 bp, Severe acute respiratory syndrome coronavirus 2
attcacgtcgggcagaatgtg

SEQ ID NO: 2580 - DNA, 21 bp, Severe acute respiratory syndrome coronavirus 2
ttcacgtcgggcagaatgtgg

SEQ ID NO: 2581 - DNA, 21 bp, Severe acute respiratory syndrome coronavirus 2
tcacgtcgggcagaatgtggc

SEQ ID NO: 2582 - DNA, 21 bp, Severe acute respiratory syndrome coronavirus 2
cacgtcgggcagaatgtggca

SEQ ID NO: 2583 - DNA, 21 bp, Severe acute respiratory syndrome coronavirus 2
acgtcgggcagaatgtggcac

SEQ ID NO: 2584 - DNA, 21 bp, Severe acute respiratory syndrome coronavirus 2
cgtcgggcagaatgtggcacg

SEQ ID NO: 2585 - DNA, 21 bp, Severe acute respiratory syndrome coronavirus 2
gtcgggcagaatgtggcacgc

SEQ ID NO: 2586 - DNA, 21 bp, Severe acute respiratory syndrome coronavirus 2
tcgggcagaatgtggcacgcc

SEQ ID NO: 2587 - DNA, 21 bp, Severe acute respiratory syndrome coronavirus 2
cgggcagaatgtggcacgccg

SEQ ID NO: 2588 - DNA, 21 bp, Severe acute respiratory syndrome coronavirus 2
gggcagaatgtggcacgccgt

SEQ ID NO: 2589 - DNA, 21 bp, Severe acute respiratory syndrome coronavirus 2
ggcagaatgtggcacgccgtg

SEQ ID NO: 2590 - DNA, 21 bp, Severe acute respiratory syndrome coronavirus 2
gcagaatgtggcacgccgtgt

SEQ ID NO: 2591 - DNA, 21 bp, Severe acute respiratory syndrome coronavirus 2
cagaatgtggcacgccgtgtc

SEQ ID NO: 2592 - DNA, 21 bp, Severe acute respiratory syndrome coronavirus 2
agaatgtggcacgccgtgtcc

SEQ ID NO: 2593 - DNA, 21 bp, Severe acute respiratory syndrome coronavirus 2
gaatgtggcacgccgtgtccg

SEQ ID NO: 2594 - DNA, 21 bp, Severe acute respiratory syndrome coronavirus 2
aatgtggcacgccgtgtccgt

SEQ ID NO: 2595 - DNA, 21 bp, Severe acute respiratory syndrome coronavirus 2
atgtggcacgccgtgtccgtg

SEQ ID NO: 2596 - DNA, 21 bp, Severe acute respiratory syndrome coronavirus 2
tgtggcacgccgtgtccgtga

SEQ ID NO: 2597 - DNA, 21 bp, Severe acute respiratory syndrome coronavirus 2
gtggcacgccgtgtccgtgat

SEQ ID NO: 2598 - DNA, 21 bp, Severe acute respiratory syndrome coronavirus 2
tggcacgccgtgtccgtgatc

SEQ ID NO: 2599 - DNA, 21 bp, Severe acute respiratory syndrome coronavirus 2
ccactgtaccatggtgtatat

SEQ ID NO: 2600 - DNA, 21 bp, Severe acute respiratory syndrome coronavirus 2
cactgtaccatggtgtatata

SEQ ID NO: 2601 - DNA, 21 bp, Severe acute respiratory syndrome coronavirus 2
actgtaccatggtgtatatag

SEQ ID NO: 2602 - DNA, 21 bp, Severe acute respiratory syndrome coronavirus 2
ctgtaccatggtgtatatagt

SEQ ID NO: 2603 - DNA, 21 bp, Severe acute respiratory syndrome coronavirus 2
tgtaccatggtgtatatagtg

SEQ ID NO: 2604 - DNA, 21 bp, Severe acute respiratory syndrome coronavirus 2
gtaccatggtgtatatagtgc

SEQ ID NO: 2605 - DNA, 21 bp, Severe acute respiratory syndrome coronavirus 2
taccatggtgtatatagtgca

SEQ ID NO: 2606 - DNA, 21 bp, Severe acute respiratory syndrome coronavirus 2
accatggtgtatatagtgcag

SEQ ID NO: 2607 - DNA, 21 bp, Severe acute respiratory syndrome coronavirus 2
ccatggtgtatatagtgcagt

SEQ ID NO: 2608 - DNA, 21 bp, Severe acute respiratory syndrome coronavirus 2
ctggcaataaaatttataacc

SEQ ID NO: 2609 - DNA, 21 bp, Severe acute respiratory syndrome coronavirus 2
tggcaataaaatttataaccc

SEQ ID NO: 2610 - DNA, 21 bp, Severe acute respiratory syndrome coronavirus 2
ggcaataaaatttataaccct

SEQ ID NO: 2611 - DNA, 21 bp, Severe acute respiratory syndrome coronavirus 2
ggtggatgttcaaaacctggt

SEQ ID NO: 2612 - DNA, 21 bp, Severe acute respiratory syndrome coronavirus 2
gtggatgttcaaaacctggtg

SEQ ID NO: 2613 - DNA, 21 bp, Severe acute respiratory syndrome coronavirus 2
tggatgttcaaaacctggtga

SEQ ID NO: 2614 - DNA, 21 bp, Severe acute respiratory syndrome coronavirus 2
ggatgttcaaaacctggtgat

SEQ ID NO: 2615 - DNA, 21 bp, Severe acute respiratory syndrome coronavirus 2
gatgttcaaaacctggtgatc

SEQ ID NO: 2616 - DNA, 21 bp, Severe acute respiratory syndrome coronavirus 2
atgttcaaaacctggtgatca

SEQ ID NO: 2617 - DNA, 21 bp, Severe acute respiratory syndrome coronavirus 2
catgtattagtcctacatttg

SEQ ID NO: 2618 - DNA, 21 bp, Severe acute respiratory syndrome coronavirus 2
atgtattagtcctacatttga

SEQ ID NO: 2619 - DNA, 21 bp, Severe acute respiratory syndrome coronavirus 2
tgtattagtcctacatttgaa

SEQ ID NO: 2620 - DNA, 21 bp, Severe acute respiratory syndrome coronavirus 2
gtattagtcctacatttgaat

SEQ ID NO: 2621 - DNA, 21 bp, Severe acute respiratory syndrome coronavirus 2
tattagtcctacatttgaatg

SEQ ID NO: 2622 - DNA, 21 bp, Severe acute respiratory syndrome coronavirus 2
attagtcctacatttgaatgt

SEQ ID NO: 2623 - DNA, 21 bp, Severe acute respiratory syndrome coronavirus 2
ttagtcctacatttgaatgta

SEQ ID NO: 2624 - DNA, 21 bp, Severe acute respiratory syndrome coronavirus 2
tagtcctacatttgaatgtat

SEQ ID NO: 2625 - DNA, 21 bp, Severe acute respiratory syndrome coronavirus 2
agtcctacatttgaatgtatc

SEQ ID NO: 2626 - DNA, 21 bp, Severe acute respiratory syndrome coronavirus 2
gtcctacatttgaatgtatcg

SEQ ID NO: 2627 - DNA, 21 bp, Severe acute respiratory syndrome coronavirus 2
tcctacatttgaatgtatcga

SEQ ID NO: 2628 - DNA, 21 bp, Severe acute respiratory syndrome coronavirus 2
cctacatttgaatgtatcgag

SEQ ID NO: 2629 - DNA, 21 bp, Severe acute respiratory syndrome coronavirus 2
ttacaacgaaaagtttgacag

SEQ ID NO: 2630 - DNA, 21 bp, Severe acute respiratory syndrome coronavirus 2
tacaacgaaaagtttgacagt

SEQ ID NO: 2631 - DNA, 21 bp, Severe acute respiratory syndrome coronavirus 2
acaacgaaaagtttgacagtt

SEQ ID NO: 2632 - DNA, 21 bp, Severe acute respiratory syndrome coronavirus 2
caacgaaaagtttgacagttt

SEQ ID NO: 2633 - DNA, 21 bp, Severe acute respiratory syndrome coronavirus 2
aacgaaaagtttgacagtttg

SEQ ID NO: 2634 - DNA, 21 bp, Severe acute respiratory syndrome coronavirus 2
acgaaaagtttgacagtttgg

SEQ ID NO: 2635 - DNA, 21 bp, Severe acute respiratory syndrome coronavirus 2
cgaaaagtttgacagtttggg

SEQ ID NO: 2636 - DNA, 21 bp, Severe acute respiratory syndrome coronavirus 2
gaaaagtttgacagtttgggc

SEQ ID NO: 2637 - DNA, 21 bp, Severe acute respiratory syndrome coronavirus 2
aaaagtttgacagtttgggcc

SEQ ID NO: 2638 - DNA, 21 bp, Severe acute respiratory syndrome coronavirus 2
aaagtttgacagtttgggcca

SEQ ID NO: 2639 - DNA, 21 bp, Severe acute respiratory syndrome coronavirus 2
aagtttgacagtttgggccat

SEQ ID NO: 2640 - DNA, 21 bp, Severe acute respiratory syndrome coronavirus 2
agtttgacagtttgggccatt

SEQ ID NO: 2641 - DNA, 21 bp, Severe acute respiratory syndrome coronavirus 2
gtttgacagtttgggccatta

SEQ ID NO: 2642 - DNA, 21 bp, Severe acute respiratory syndrome coronavirus 2
tttgacagtttgggccattaa

SEQ ID NO: 2643 - DNA, 21 bp, Severe acute respiratory syndrome coronavirus 2
ttgacagtttgggccattaaa

SEQ ID NO: 2644 - DNA, 21 bp, Severe acute respiratory syndrome coronavirus 2
tgacagtttgggccattaaaa

SEQ ID NO: 2645 - DNA, 21 bp, Severe acute respiratory syndrome coronavirus 2
gacagtttgggccattaaaat

SEQ ID NO: 2646 - DNA, 21 bp, Severe acute respiratory syndrome coronavirus 2
acagtttgggccattaaaatt

SEQ ID NO: 2647 - DNA, 21 bp, Severe acute respiratory syndrome coronavirus 2
aagaaattccttccttcaaga

SEQ ID NO: 2648 - DNA, 21 bp, Severe acute respiratory syndrome coronavirus 2
agaaattccttccttcaagac

SEQ ID NO: 2649 - DNA, 21 bp, Severe acute respiratory syndrome coronavirus 2
gaaattccttccttcaagaca

SEQ ID NO: 2650 - DNA, 21 bp, Severe acute respiratory syndrome coronavirus 2
aaattccttccttcaagacaa

SEQ ID NO: 2651 - DNA, 21 bp, Severe acute respiratory syndrome coronavirus 2
aattccttccttcaagacaac

SEQ ID NO: 2652 - DNA, 21 bp, Severe acute respiratory syndrome coronavirus 2
attccttccttcaagacaact

SEQ ID NO: 2653 - DNA, 21 bp, Severe acute respiratory syndrome coronavirus 2
ttccttccttcaagacaactt

SEQ ID NO: 2654 - DNA, 21 bp, Severe acute respiratory syndrome coronavirus 2
attttgtgaagaagaaacgag

SEQ ID NO: 2655 - DNA, 21 bp, Severe acute respiratory syndrome coronavirus 2
ttttgtgaagaagaaacgagt

SEQ ID NO: 2656 - DNA, 21 bp, Severe acute respiratory syndrome coronavirus 2
tttgtgaagaagaaacgagtc

SEQ ID NO: 2657 - DNA, 21 bp, Severe acute respiratory syndrome coronavirus 2
ttgtgaagaagaaacgagtcc

SEQ ID NO: 2658 - DNA, 21 bp, Severe acute respiratory syndrome coronavirus 2
tgtgaagaagaaacgagtcct

SEQ ID NO: 2659 - DNA, 21 bp, Severe acute respiratory syndrome coronavirus 2
gtgaagaagaaacgagtccta

SEQ ID NO: 2660 - DNA, 21 bp, Severe acute respiratory syndrome coronavirus 2
tgaagaagaaacgagtcctac

SEQ ID NO: 2661 - DNA, 21 bp, Severe acute respiratory syndrome coronavirus 2
gaagaagaaacgagtcctacc

SEQ ID NO: 2662 - DNA, 21 bp, Severe acute respiratory syndrome coronavirus 2
ggttgttacacactatagtct

SEQ ID NO: 2663 - DNA, 21 bp, Severe acute respiratory syndrome coronavirus 2
gttgttacacactatagtctg

SEQ ID NO: 2664 - DNA, 21 bp, Severe acute respiratory syndrome coronavirus 2
ttgttacacactatagtctgt

SEQ ID NO: 2665 - DNA, 21 bp, Severe acute respiratory syndrome coronavirus 2
tgttacacactatagtctgtt

SEQ ID NO: 2666 - DNA, 21 bp, Severe acute respiratory syndrome coronavirus 2
gttacacactatagtctgttg

SEQ ID NO: 2667 - DNA, 21 bp, Severe acute respiratory syndrome coronavirus 2
ttacacactatagtctgttga

SEQ ID NO: 2668 - DNA, 21 bp, Severe acute respiratory syndrome coronavirus 2
atgaaactaacaatgctacca

SEQ ID NO: 2669 - DNA, 21 bp, Severe acute respiratory syndrome coronavirus 2
tgaaactaacaatgctaccac

SEQ ID NO: 2670 - DNA, 21 bp, Severe acute respiratory syndrome coronavirus 2
gaaactaacaatgctaccacc

SEQ ID NO: 2671 - DNA, 21 bp, Severe acute respiratory syndrome coronavirus 2
aaactaacaatgctaccaccg

SEQ ID NO: 2672 - DNA, 21 bp, Severe acute respiratory syndrome coronavirus 2
aactaacaatgctaccaccga

SEQ ID NO: 2673 - DNA, 21 bp, Severe acute respiratory syndrome coronavirus 2
actaacaatgctaccaccgac

SEQ ID NO: 2674 - DNA, 21 bp, Severe acute respiratory syndrome coronavirus 2
ctaacaatgctaccaccgaca

SEQ ID NO: 2675 - DNA, 21 bp, Severe acute respiratory syndrome coronavirus 2
taacaatgctaccaccgacat

SEQ ID NO: 2676 - DNA, 21 bp, Severe acute respiratory syndrome coronavirus 2
aacaatgctaccaccgacata

SEQ ID NO: 2677 - DNA, 21 bp, Severe acute respiratory syndrome coronavirus 2
tttaccccattccgatctgaa

SEQ ID NO: 2678 - DNA, 21 bp, Severe acute respiratory syndrome coronavirus 2
ttaccccattccgatctgaaa

SEQ ID NO: 2679 - DNA, 21 bp, Severe acute respiratory syndrome coronavirus 2
taccccattccgatctgaaat

SEQ ID NO: 2680 - DNA, 21 bp, Severe acute respiratory syndrome coronavirus 2
accccattccgatctgaaata

SEQ ID NO: 2681 - DNA, 21 bp, Severe acute respiratory syndrome coronavirus 2
ccccattccgatctgaaataa

SEQ ID NO: 2682 - DNA, 21 bp, Severe acute respiratory syndrome coronavirus 2
cccattccgatctgaaataat

SEQ ID NO: 2683 - DNA, 21 bp, Severe acute respiratory syndrome coronavirus 2
ccattccgatctgaaataata

SEQ ID NO: 2684 - DNA, 21 bp, Severe acute respiratory syndrome coronavirus 2
cattccgatctgaaataatac

SEQ ID NO: 2685 - DNA, 21 bp, Severe acute respiratory syndrome coronavirus 2
attccgatctgaaataatact

SEQ ID NO: 2686 - DNA, 21 bp, Severe acute respiratory syndrome coronavirus 2
agttactcaatactcctagtt

SEQ ID NO: 2687 - DNA, 21 bp, Severe acute respiratory syndrome coronavirus 2
gttactcaatactcctagttc

SEQ ID NO: 2688 - DNA, 21 bp, Severe acute respiratory syndrome coronavirus 2
ttactcaatactcctagttct

SEQ ID NO: 2689 - DNA, 21 bp, Severe acute respiratory syndrome coronavirus 2
tactcaatactcctagttcta

SEQ ID NO: 2690 - DNA, 21 bp, Severe acute respiratory syndrome coronavirus 2
actcaatactcctagttctac

SEQ ID NO: 2691 - DNA, 21 bp, Severe acute respiratory syndrome coronavirus 2
ctcaatactcctagttctacg

SEQ ID NO: 2692 - DNA, 21 bp, Severe acute respiratory syndrome coronavirus 2
tcaatactcctagttctacgt

SEQ ID NO: 2693 - DNA, 21 bp, Severe acute respiratory syndrome coronavirus 2
caatactcctagttctacgtg

SEQ ID NO: 2694 - DNA, 21 bp, Severe acute respiratory syndrome coronavirus 2
aatactcctagttctacgtga

SEQ ID NO: 2695 - DNA, 21 bp, Severe acute respiratory syndrome coronavirus 2
tattgagtttacttagaattc

SEQ ID NO: 2696 - DNA, 21 bp, Severe acute respiratory syndrome coronavirus 2
attgagtttacttagaattca

SEQ ID NO: 2697 - DNA, 21 bp, Severe acute respiratory syndrome coronavirus 2
ttgagtttacttagaattcat

SEQ ID NO: 2698 - DNA, 21 bp, Severe acute respiratory syndrome coronavirus 2
tgagtttacttagaattcata

SEQ ID NO: 2699 - DNA, 21 bp, Severe acute respiratory syndrome coronavirus 2
gagtttacttagaattcatac

SEQ ID NO: 2700 - DNA, 21 bp, Severe acute respiratory syndrome coronavirus 2
agtttacttagaattcatacg

SEQ ID NO: 2701 - DNA, 21 bp, Severe acute respiratory syndrome coronavirus 2
gtttacttagaattcatacgg

SEQ ID NO: 2702 - DNA, 21 bp, Severe acute respiratory syndrome coronavirus 2
tttacttagaattcatacggt

SEQ ID NO: 2703 - DNA, 21 bp, Severe acute respiratory syndrome coronavirus 2
ttacttagaattcatacggta

SEQ ID NO: 2704 - DNA, 21 bp, Severe acute respiratory syndrome coronavirus 2
tacttagaattcatacggtaa

SEQ ID NO: 2705 - DNA, 21 bp, Severe acute respiratory syndrome coronavirus 2
acttagaattcatacggtaat

SEQ ID NO: 2706 - DNA, 21 bp, Severe acute respiratory syndrome coronavirus 2
cttagaattcatacggtaatc

SEQ ID NO: 2707 - DNA, 21 bp, Severe acute respiratory syndrome coronavirus 2
ttagaattcatacggtaatca

SEQ ID NO: 2708 - DNA, 21 bp, Severe acute respiratory syndrome coronavirus 2
tagaattcatacggtaatcac

SEQ ID NO: 2709 - DNA, 21 bp, Severe acute respiratory syndrome coronavirus 2
agaattcatacggtaatcacg

SEQ ID NO: 2710 - DNA, 21 bp, Severe acute respiratory syndrome coronavirus 2
gaattcatacggtaatcacgt

SEQ ID NO: 2711 - DNA, 21 bp, Severe acute respiratory syndrome coronavirus 2
aattcatacggtaatcacgtt

SEQ ID NO: 2712 - DNA, 21 bp, Severe acute respiratory syndrome coronavirus 2
attcatacggtaatcacgttt

SEQ ID NO: 2713 - DNA, 21 bp, Severe acute respiratory syndrome coronavirus 2
ttcatacggtaatcacgtttc

SEQ ID NO: 2714 - DNA, 21 bp, Severe acute respiratory syndrome coronavirus 2
tcatacggtaatcacgtttct

SEQ ID NO: 2715 - DNA, 21 bp, Severe acute respiratory syndrome coronavirus 2
catacggtaatcacgtttctt

SEQ ID NO: 2716 - DNA, 21 bp, Severe acute respiratory syndrome coronavirus 2
atacggtaatcacgtttctta

SEQ ID NO: 2717 - DNA, 21 bp, Severe acute respiratory syndrome coronavirus 2
tacggtaatcacgtttcttat

SEQ ID NO: 2718 - DNA, 21 bp, Severe acute respiratory syndrome coronavirus 2
acggtaatcacgtttcttatc

SEQ ID NO: 2719 - DNA, 21 bp, Severe acute respiratory syndrome coronavirus 2
cggtaatcacgtttcttatct

SEQ ID NO: 2720 - DNA, 21 bp, Severe acute respiratory syndrome coronavirus 2
ggtaatcacgtttcttatctc

SEQ ID NO: 2721 - DNA, 21 bp, Severe acute respiratory syndrome coronavirus 2
gtaatcacgtttcttatctcg

SEQ ID NO: 2722 - DNA, 21 bp, Severe acute respiratory syndrome coronavirus 2
taatcacgtttcttatctcga

SEQ ID NO: 2723 - DNA, 21 bp, Severe acute respiratory syndrome coronavirus 2
aatcacgtttcttatctcgag

SEQ ID NO: 2724 - DNA, 21 bp, Severe acute respiratory syndrome coronavirus 2
atcacgtttcttatctcgagc

SEQ ID NO: 2725 - DNA, 21 bp, Severe acute respiratory syndrome coronavirus 2
tcacgtttcttatctcgagcg

SEQ ID NO: 2726 - DNA, 21 bp, Severe acute respiratory syndrome coronavirus 2
cacgtttcttatctcgagcgt

SEQ ID NO: 2727 - DNA, 21 bp, Severe acute respiratory syndrome coronavirus 2
acgtttcttatctcgagcgtg

SEQ ID NO: 2728 - DNA, 21 bp, Severe acute respiratory syndrome coronavirus 2
cgtttcttatctcgagcgtgg

SEQ ID NO: 2729 - DNA, 21 bp, Severe acute respiratory syndrome coronavirus 2
gtttcttatctcgagcgtggc

SEQ ID NO: 2730 - DNA, 21 bp, Severe acute respiratory syndrome coronavirus 2
tttcttatctcgagcgtggca

SEQ ID NO: 2731 - DNA, 21 bp, Severe acute respiratory syndrome coronavirus 2
ttcttatctcgagcgtggcat

SEQ ID NO: 2732 - DNA, 21 bp, Severe acute respiratory syndrome coronavirus 2
tcttatctcgagcgtggcatc

SEQ ID NO: 2733 - DNA, 21 bp, Severe acute respiratory syndrome coronavirus 2
cttatctcgagcgtggcatcg

SEQ ID NO: 2734 - DNA, 21 bp, Severe acute respiratory syndrome coronavirus 2
ttatctcgagcgtggcatcga

SEQ ID NO: 2735 - DNA, 21 bp, Severe acute respiratory syndrome coronavirus 2
tatctcgagcgtggcatcgac

SEQ ID NO: 2736 - DNA, 21 bp, Severe acute respiratory syndrome coronavirus 2
atctcgagcgtggcatcgacc

SEQ ID NO: 2737 - DNA, 21 bp, Severe acute respiratory syndrome coronavirus 2
tctcgagcgtggcatcgacca

SEQ ID NO: 2738 - DNA, 21 bp, Severe acute respiratory syndrome coronavirus 2
ctcgagcgtggcatcgaccac

SEQ ID NO: 2739 - DNA, 21 bp, Severe acute respiratory syndrome coronavirus 2
tcgagcgtggcatcgaccaca

SEQ ID NO: 2740 - DNA, 21 bp, Severe acute respiratory syndrome coronavirus 2
cgagcgtggcatcgaccacag

SEQ ID NO: 2741 - DNA, 21 bp, Severe acute respiratory syndrome coronavirus 2
gagcgtggcatcgaccacaga

SEQ ID NO: 2742 - DNA, 21 bp, Severe acute respiratory syndrome coronavirus 2
agcgtggcatcgaccacagag

SEQ ID NO: 2743 - DNA, 21 bp, Severe acute respiratory syndrome coronavirus 2
gcgtggcatcgaccacagaga

SEQ ID NO: 2744 - DNA, 21 bp, Severe acute respiratory syndrome coronavirus 2
cgtggcatcgaccacagagat

SEQ ID NO: 2745 - DNA, 21 bp, Severe acute respiratory syndrome coronavirus 2
gtggcatcgaccacagagata

SEQ ID NO: 2746 - DNA, 21 bp, Severe acute respiratory syndrome coronavirus 2
tggcatcgaccacagagatag

SEQ ID NO: 2747 - DNA, 21 bp, Severe acute respiratory syndrome coronavirus 2
ggcatcgaccacagagataga

SEQ ID NO: 2748 - DNA, 21 bp, Severe acute respiratory syndrome coronavirus 2
gcatcgaccacagagatagac

SEQ ID NO: 2749 - DNA, 21 bp, Severe acute respiratory syndrome coronavirus 2
catcgaccacagagatagaca

SEQ ID NO: 2750 - DNA, 21 bp, Severe acute respiratory syndrome coronavirus 2
atcgaccacagagatagacat

SEQ ID NO: 2751 - DNA, 21 bp, Severe acute respiratory syndrome coronavirus 2
tcgaccacagagatagacatc

SEQ ID NO: 2752 - DNA, 21 bp, Severe acute respiratory syndrome coronavirus 2
cgaccacagagatagacatca

SEQ ID NO: 2753 - DNA, 21 bp, Severe acute respiratory syndrome coronavirus 2
gaccacagagatagacatcat

SEQ ID NO: 2754 - DNA, 21 bp, Severe acute respiratory syndrome coronavirus 2
accacagagatagacatcatg

SEQ ID NO: 2755 - DNA, 21 bp, Severe acute respiratory syndrome coronavirus 2
ccacagagatagacatcatga

SEQ ID NO: 2756 - DNA, 21 bp, Severe acute respiratory syndrome coronavirus 2
cacagagatagacatcatgat

SEQ ID NO: 2757 - DNA, 21 bp, Severe acute respiratory syndrome coronavirus 2
acagagatagacatcatgata

SEQ ID NO: 2758 - DNA, 21 bp, Severe acute respiratory syndrome coronavirus 2
cagagatagacatcatgatac

SEQ ID NO: 2759 - DNA, 21 bp, Severe acute respiratory syndrome coronavirus 2
agagatagacatcatgatact

SEQ ID NO: 2760 - DNA, 21 bp, Severe acute respiratory syndrome coronavirus 2
gagatagacatcatgatactg

SEQ ID NO: 2761 - DNA, 21 bp, Severe acute respiratory syndrome coronavirus 2
agttatcggcggtgatctcct

SEQ ID NO: 2762 - DNA, 21 bp, Severe acute respiratory syndrome coronavirus 2
gttatcggcggtgatctcctc

SEQ ID NO: 2763 - DNA, 21 bp, Severe acute respiratory syndrome coronavirus 2
ttatcggcggtgatctcctcg

SEQ ID NO: 2764 - DNA, 21 bp, Severe acute respiratory syndrome coronavirus 2
tatcggcggtgatctcctcga

SEQ ID NO: 2765 - DNA, 21 bp, Severe acute respiratory syndrome coronavirus 2
atcggcggtgatctcctcgat

SEQ ID NO: 2766 - DNA, 21 bp, Severe acute respiratory syndrome coronavirus 2
tcggcggtgatctcctcgatg

SEQ ID NO: 2767 - DNA, 21 bp, Severe acute respiratory syndrome coronavirus 2
cggcggtgatctcctcgatga

SEQ ID NO: 2768 - DNA, 21 bp, Severe acute respiratory syndrome coronavirus 2
ggcggtgatctcctcgatgac

SEQ ID NO: 2769 - DNA, 21 bp, Severe acute respiratory syndrome coronavirus 2
gcggtgatctcctcgatgaca

SEQ ID NO: 2770 - DNA, 21 bp, Severe acute respiratory syndrome coronavirus 2
tctcggtacggattgtacgaa

SEQ ID NO: 2771 - DNA, 21 bp, Severe acute respiratory syndrome coronavirus 2
ctcggtacggattgtacgaat

SEQ ID NO: 2772 - DNA, 21 bp, Severe acute respiratory syndrome coronavirus 2
tcggtacggattgtacgaatc

SEQ ID NO: 2773 - DNA, 21 bp, Severe acute respiratory syndrome coronavirus 2
gaacaagaacgagcgtttgta

SEQ ID NO: 2774 - DNA, 21 bp, Severe acute respiratory syndrome coronavirus 2
aacaagaacgagcgtttgtat

SEQ ID NO: 2775 - DNA, 21 bp, Severe acute respiratory syndrome coronavirus 2
tgttgacgaatacgattatca

SEQ ID NO: 2776 - DNA, 21 bp, Severe acute respiratory syndrome coronavirus 2
gttgacgaatacgattatcac

SEQ ID NO: 2777 - DNA, 21 bp, Severe acute respiratory syndrome coronavirus 2
ttgacgaatacgattatcaca

SEQ ID NO: 2778 - DNA, 21 bp, Severe acute respiratory syndrome coronavirus 2
atactcacagagatatcttta

SEQ ID NO: 2779 - DNA, 21 bp, Severe acute respiratory syndrome coronavirus 2
tactcacagagatatctttat

SEQ ID NO: 2780 - DNA, 21 bp, Severe acute respiratory syndrome coronavirus 2
actcacagagatatctttatc

SEQ ID NO: 2781 - DNA, 21 bp, Severe acute respiratory syndrome coronavirus 2
acctgactctgactggaatga

SEQ ID NO: 2782 - DNA, 21 bp, Severe acute respiratory syndrome coronavirus 2
cctgactctgactggaatgat

SEQ ID NO: 2783 - DNA, 21 bp, Severe acute respiratory syndrome coronavirus 2
ctgactctgactggaatgatt

SEQ ID NO: 2784 - DNA, 21 bp, Severe acute respiratory syndrome coronavirus 2
tgactctgactggaatgattt

SEQ ID NO: 2785 - DNA, 21 bp, Severe acute respiratory syndrome coronavirus 2
gactctgactggaatgatttc

SEQ ID NO: 2786 - DNA, 21 bp, Severe acute respiratory syndrome coronavirus 2
actctgactggaatgatttcc

SEQ ID NO: 2787 - DNA, 21 bp, Severe acute respiratory syndrome coronavirus 2
ctctgactggaatgatttcct

SEQ ID NO: 2788 - DNA, 21 bp, Severe acute respiratory syndrome coronavirus 2
tctgactggaatgatttcctg

SEQ ID NO: 2789 - DNA, 21 bp, Severe acute respiratory syndrome coronavirus 2
ctgactggaatgatttcctgg

SEQ ID NO: 2790 - DNA, 21 bp, Severe acute respiratory syndrome coronavirus 2
tgactggaatgatttcctgga

SEQ ID NO: 2791 - DNA, 21 bp, Severe acute respiratory syndrome coronavirus 2
gactggaatgatttcctggag

SEQ ID NO: 2792 - DNA, 21 bp, Severe acute respiratory syndrome coronavirus 2
actggaatgatttcctggagt

SEQ ID NO: 2793 - DNA, 21 bp, Severe acute respiratory syndrome coronavirus 2
ttttgtctaccatgtgaatac

SEQ ID NO: 2794 - DNA, 21 bp, Severe acute respiratory syndrome coronavirus 2
tttgtctaccatgtgaatact

SEQ ID NO: 2795 - DNA, 21 bp, Severe acute respiratory syndrome coronavirus 2
ttgtctaccatgtgaatacta

SEQ ID NO: 2796 - DNA, 21 bp, Severe acute respiratory syndrome coronavirus 2
tgtctaccatgtgaatactaa

SEQ ID NO: 2797 - DNA, 21 bp, Severe acute respiratory syndrome coronavirus 2
gtctaccatgtgaatactaac

SEQ ID NO: 2798 - DNA, 21 bp, Severe acute respiratory syndrome coronavirus 2
tctaccatgtgaatactaact

SEQ ID NO: 2799 - DNA, 21 bp, Severe acute respiratory syndrome coronavirus 2
ggattagtcctcatacgacta

SEQ ID NO: 2800 - DNA, 21 bp, Severe acute respiratory syndrome coronavirus 2
gattagtcctcatacgactac

SEQ ID NO: 2801 - DNA, 21 bp, Severe acute respiratory syndrome coronavirus 2
attagtcctcatacgactaca

SEQ ID NO: 2802 - DNA, 21 bp, Severe acute respiratory syndrome coronavirus 2
cctctcatgtggaaacttttt

SEQ ID NO: 2803 - DNA, 21 bp, Severe acute respiratory syndrome coronavirus 2
ctctcatgtggaaactttttc

SEQ ID NO: 2804 - DNA, 21 bp, Severe acute respiratory syndrome coronavirus 2
tctcatgtggaaactttttcc

SEQ ID NO: 2805 - DNA, 21 bp, Severe acute respiratory syndrome coronavirus 2
ctcatgtggaaactttttcca

SEQ ID NO: 2806 - DNA, 21 bp, Severe acute respiratory syndrome coronavirus 2
tcatgtggaaactttttccac

SEQ ID NO: 2807 - DNA, 21 bp, Severe acute respiratory syndrome coronavirus 2
catgtggaaactttttccact

SEQ ID NO: 2808 - DNA, 21 bp, Severe acute respiratory syndrome coronavirus 2
atgtggaaactttttccactg

SEQ ID NO: 2809 - DNA, 21 bp, Severe acute respiratory syndrome coronavirus 2
tgtggaaactttttccactga

SEQ ID NO: 2810 - DNA, 21 bp, Severe acute respiratory syndrome coronavirus 2
gtggaaactttttccactgat

SEQ ID NO: 2811 - DNA, 21 bp, Severe acute respiratory syndrome coronavirus 2
tggaaactttttccactgata

SEQ ID NO: 2812 - DNA, 21 bp, Severe acute respiratory syndrome coronavirus 2
ggaaactttttccactgatac

SEQ ID NO: 2813 - DNA, 21 bp, Severe acute respiratory syndrome coronavirus 2
gaaactttttccactgatacc

SEQ ID NO: 2814 - DNA, 21 bp, Severe acute respiratory syndrome coronavirus 2
aaactttttccactgatacca

SEQ ID NO: 2815 - DNA, 21 bp, Severe acute respiratory syndrome coronavirus 2
aactttttccactgataccac

SEQ ID NO: 2816 - DNA, 21 bp, Severe acute respiratory syndrome coronavirus 2
actttttccactgataccact

SEQ ID NO: 2817 - DNA, 21 bp, Severe acute respiratory syndrome coronavirus 2
ctttttccactgataccacta

SEQ ID NO: 2818 - DNA, 21 bp, Severe acute respiratory syndrome coronavirus 2
tttttccactgataccactac

SEQ ID NO: 2819 - DNA, 21 bp, Severe acute respiratory syndrome coronavirus 2
ttttccactgataccactacg

SEQ ID NO: 2820 - DNA, 21 bp, Severe acute respiratory syndrome coronavirus 2
tttccactgataccactacga

SEQ ID NO: 2821 - DNA, 21 bp, Severe acute respiratory syndrome coronavirus 2
ttccactgataccactacgac

SEQ ID NO: 2822 - DNA, 21 bp, Severe acute respiratory syndrome coronavirus 2
tccactgataccactacgaca

SEQ ID NO: 2823 - DNA, 21 bp, Severe acute respiratory syndrome coronavirus 2
ccactgataccactacgacaa

SEQ ID NO: 2824 - DNA, 21 bp, Severe acute respiratory syndrome coronavirus 2
cactgataccactacgacaac

SEQ ID NO: 2825 - DNA, 21 bp, Severe acute respiratory syndrome coronavirus 2
actgataccactacgacaaca

SEQ ID NO: 2826 - DNA, 21 bp, Severe acute respiratory syndrome coronavirus 2
gatcacggtgttctcgtgata

SEQ ID NO: 2827 - DNA, 21 bp, Severe acute respiratory syndrome coronavirus 2
atcacggtgttctcgtgatac

SEQ ID NO: 2828 - DNA, 21 bp, Severe acute respiratory syndrome coronavirus 2
tcacggtgttctcgtgataca

SEQ ID NO: 2829 - DNA, 21 bp, Severe acute respiratory syndrome coronavirus 2
tagagtctactcaaaagatcg

SEQ ID NO: 2830 - DNA, 21 bp, Severe acute respiratory syndrome coronavirus 2
agagtctactcaaaagatcgt

SEQ ID NO: 2831 - DNA, 21 bp, Severe acute respiratory syndrome coronavirus 2
gagtctactcaaaagatcgtt

SEQ ID NO: 2832 - DNA, 21 bp, Severe acute respiratory syndrome coronavirus 2
agtctactcaaaagatcgtta

SEQ ID NO: 2833 - DNA, 21 bp, Severe acute respiratory syndrome coronavirus 2
gtctactcaaaagatcgttac

SEQ ID NO: 2834 - DNA, 21 bp, Severe acute respiratory syndrome coronavirus 2
tctactcaaaagatcgttaca

SEQ ID NO: 2835 - DNA, 21 bp, Severe acute respiratory syndrome coronavirus 2
ctactcaaaagatcgttacaa

SEQ ID NO: 2836 - DNA, 21 bp, Severe acute respiratory syndrome coronavirus 2
tactcaaaagatcgttacaac

SEQ ID NO: 2837 - DNA, 21 bp, Severe acute respiratory syndrome coronavirus 2
actcaaaagatcgttacaacg

SEQ ID NO: 2838 - DNA, 21 bp, Severe acute respiratory syndrome coronavirus 2
ctcaaaagatcgttacaacgt

SEQ ID NO: 2839 - DNA, 21 bp, Severe acute respiratory syndrome coronavirus 2
tcaaaagatcgttacaacgtt

SEQ ID NO: 2840 - DNA, 21 bp, Severe acute respiratory syndrome coronavirus 2
caaaagatcgttacaacgttt

SEQ ID NO: 2841 - DNA, 21 bp, Severe acute respiratory syndrome coronavirus 2
aaaagatcgttacaacgttta

SEQ ID NO: 2842 - DNA, 21 bp, Severe acute respiratory syndrome coronavirus 2
aaagatcgttacaacgtttaa

SEQ ID NO: 2843 - DNA, 21 bp, Severe acute respiratory syndrome coronavirus 2
aagatcgttacaacgtttaat

SEQ ID NO: 2844 - DNA, 21 bp, Severe acute respiratory syndrome coronavirus 2
cctggtggaccatgaccattc

SEQ ID NO: 2845 - DNA, 21 bp, Severe acute respiratory syndrome coronavirus 2
ctggtggaccatgaccattct

SEQ ID NO: 2846 - DNA, 21 bp, Severe acute respiratory syndrome coronavirus 2
tggtggaccatgaccattctc

SEQ ID NO: 2847 - DNA, 21 bp, Severe acute respiratory syndrome coronavirus 2
ggtggaccatgaccattctca

SEQ ID NO: 2848 - DNA, 21 bp, Severe acute respiratory syndrome coronavirus 2
gtggaccatgaccattctcag

SEQ ID NO: 2849 - DNA, 21 bp, Severe acute respiratory syndrome coronavirus 2
tggaccatgaccattctcagt

SEQ ID NO: 2850 - DNA, 21 bp, Severe acute respiratory syndrome coronavirus 2
ggaccatgaccattctcagta

SEQ ID NO: 2851 - DNA, 21 bp, Severe acute respiratory syndrome coronavirus 2
gaccatgaccattctcagtaa

SEQ ID NO: 2852 - DNA, 21 bp, Severe acute respiratory syndrome coronavirus 2
accatgaccattctcagtaaa

SEQ ID NO: 2853 - DNA, 21 bp, Severe acute respiratory syndrome coronavirus 2
ccatgaccattctcagtaaaa

SEQ ID NO: 2854 - DNA, 21 bp, Severe acute respiratory syndrome coronavirus 2
catgaccattctcagtaaaac

SEQ ID NO: 2855 - DNA, 21 bp, Severe acute respiratory syndrome coronavirus 2
atgaccattctcagtaaaacg

SEQ ID NO: 2856 - DNA, 21 bp, Severe acute respiratory syndrome coronavirus 2
tttaagtttcacttaagttgt

SEQ ID NO: 2857 - DNA, 21 bp, Severe acute respiratory syndrome coronavirus 2
tgtgtccgtggatgtgtggag

SEQ ID NO: 2858 - DNA, 21 bp, Severe acute respiratory syndrome coronavirus 2
gtgtccgtggatgtgtggagt

SEQ ID NO: 2859 - DNA, 21 bp, Severe acute respiratory syndrome coronavirus 2
tgtccgtggatgtgtggagtc

SEQ ID NO: 2860 - DNA, 21 bp, Severe acute respiratory syndrome coronavirus 2
tctgagtagagatactaccca

SEQ ID NO: 2861 - DNA, 21 bp, Severe acute respiratory syndrome coronavirus 2
ctgagtagagatactacccaa

SEQ ID NO: 2862 - DNA, 21 bp, Severe acute respiratory syndrome coronavirus 2
tgagtagagatactacccaaa

SEQ ID NO: 2863 - DNA, 21 bp, Severe acute respiratory syndrome coronavirus 2
gtctcaaatcttttacaccga

SEQ ID NO: 2864 - DNA, 21 bp, Severe acute respiratory syndrome coronavirus 2
tctcaaatcttttacaccgaa

SEQ ID NO: 2865 - DNA, 21 bp, Severe acute respiratory syndrome coronavirus 2
ttacctcagtgtaattaacct

SEQ ID NO: 2866 - DNA, 21 bp, Severe acute respiratory syndrome coronavirus 2
tacctcagtgtaattaacctc

SEQ ID NO: 2867 - DNA, 21 bp, Severe acute respiratory syndrome coronavirus 2
acctcagtgtaattaacctct

SEQ ID NO: 2868 - DNA, 21 bp, Severe acute respiratory syndrome coronavirus 2
cctcagtgtaattaacctctt

SEQ ID NO: 2869 - DNA, 21 bp, Severe acute respiratory syndrome coronavirus 2
taatctcttttgttgtctcaa

SEQ ID NO: 2870 - DNA, 21 bp, Severe acute respiratory syndrome coronavirus 2
aatctcttttgttgtctcaac

SEQ ID NO: 2871 - DNA, 21 bp, Severe acute respiratory syndrome coronavirus 2
atctcttttgttgtctcaaca

SEQ ID NO: 2872 - DNA, 21 bp, Severe acute respiratory syndrome coronavirus 2
ttacaagagatactcttggtt

SEQ ID NO: 2873 - DNA, 21 bp, Severe acute respiratory syndrome coronavirus 2
tacaagagatactcttggttt

SEQ ID NO: 2874 - DNA, 21 bp, Severe acute respiratory syndrome coronavirus 2
acaagagatactcttggtttt

SEQ ID NO: 2875 - DNA, 21 bp, Severe acute respiratory syndrome coronavirus 2
caagagatactcttggttttt

SEQ ID NO: 2876 - DNA, 21 bp, Severe acute respiratory syndrome coronavirus 2
cgaagacgattagaacgacga

SEQ ID NO: 2877 - DNA, 21 bp, Severe acute respiratory syndrome coronavirus 2
gaagacgattagaacgacgat

SEQ ID NO: 2878 - DNA, 21 bp, Severe acute respiratory syndrome coronavirus 2
aagacgattagaacgacgatg

SEQ ID NO: 2879 - DNA, 21 bp, Severe acute respiratory syndrome coronavirus 2
agacgattagaacgacgatga

SEQ ID NO: 2880 - DNA, 21 bp, Severe acute respiratory syndrome coronavirus 2
gacgattagaacgacgatgat

SEQ ID NO: 2881 - DNA, 21 bp, Severe acute respiratory syndrome coronavirus 2
acgattagaacgacgatgatt

SEQ ID NO: 2882 - DNA, 21 bp, Severe acute respiratory syndrome coronavirus 2
cgattagaacgacgatgattt

SEQ ID NO: 2883 - DNA, 21 bp, Severe acute respiratory syndrome coronavirus 2
gattagaacgacgatgatttt

SEQ ID NO: 2884 - DNA, 21 bp, Severe acute respiratory syndrome coronavirus 2
attagaacgacgatgatttta

SEQ ID NO: 2885 - DNA, 21 bp, Severe acute respiratory syndrome coronavirus 2
ttagaacgacgatgattttac

SEQ ID NO: 2886 - DNA, 21 bp, Severe acute respiratory syndrome coronavirus 2
tagaacgacgatgattttaca

SEQ ID NO: 2887 - DNA, 21 bp, Severe acute respiratory syndrome coronavirus 2
agaacgacgatgattttacag

SEQ ID NO: 2888 - DNA, 21 bp, Severe acute respiratory syndrome coronavirus 2
gaacctgttagtttttctcaa

SEQ ID NO: 2889 - DNA, 21 bp, Severe acute respiratory syndrome coronavirus 2
aacctgttagtttttctcaac

SEQ ID NO: 2890 - DNA, 21 bp, Severe acute respiratory syndrome coronavirus 2
acctgttagtttttctcaact

SEQ ID NO: 2891 - DNA, 21 bp, Severe acute respiratory syndrome coronavirus 2
ttagtatgtagtggtctacaa

SEQ ID NO: 2892 - DNA, 21 bp, Severe acute respiratory syndrome coronavirus 2
tagtatgtagtggtctacaac

SEQ ID NO: 2893 - DNA, 21 bp, Severe acute respiratory syndrome coronavirus 2
agtatgtagtggtctacaact

SEQ ID NO: 2894 - DNA, 21 bp, Severe acute respiratory syndrome coronavirus 2
gtatgtagtggtctacaacta

SEQ ID NO: 2895 - DNA, 21 bp, Severe acute respiratory syndrome coronavirus 2
ttctttaactggcggagttac

SEQ ID NO: 2896 - DNA, 21 bp, Severe acute respiratory syndrome coronavirus 2
tctttaactggcggagttact

SEQ ID NO: 2897 - DNA, 21 bp, Severe acute respiratory syndrome coronavirus 2
ctttaactggcggagttactc

SEQ ID NO: 2898 - DNA, 21 bp, Severe acute respiratory syndrome coronavirus 2
tttaactggcggagttactcc

SEQ ID NO: 2899 - DNA, 21 bp, Severe acute respiratory syndrome coronavirus 2
ttaactggcggagttactcca

SEQ ID NO: 2900 - DNA, 21 bp, Severe acute respiratory syndrome coronavirus 2
cagtttaatgtaatgtgtatt

SEQ ID NO: 2901 - DNA, 21 bp, Severe acute respiratory syndrome coronavirus 2
agtttaatgtaatgtgtattt

SEQ ID NO: 2902 - DNA, 21 bp, Severe acute respiratory syndrome coronavirus 2
gtttaatgtaatgtgtatttg

SEQ ID NO: 2903 - DNA, 21 bp, Severe acute respiratory syndrome coronavirus 2
tttaatgtaatgtgtatttgc

SEQ ID NO: 2904 - DNA, 21 bp, Severe acute respiratory syndrome coronavirus 2
atgttcggagtgagggaaagc

SEQ ID NO: 2905 - DNA, 21 bp, Severe acute respiratory syndrome coronavirus 2
tgttcggagtgagggaaagcc

SEQ ID NO: 2906 - DNA, 21 bp, Severe acute respiratory syndrome coronavirus 2
gttcggagtgagggaaagcct

SEQ ID NO: 2907 - DNA, 21 bp, Severe acute respiratory syndrome coronavirus 2
ttcggagtgagggaaagccta

SEQ ID NO: 2908 - DNA, 21 bp, Severe acute respiratory syndrome coronavirus 2
tcggagtgagggaaagcctac

SEQ ID NO: 2909 - DNA, 21 bp, Severe acute respiratory syndrome coronavirus 2
cggagtgagggaaagcctacc

SEQ ID NO: 2910 - DNA, 21 bp, Severe acute respiratory syndrome coronavirus 2
ggagtgagggaaagcctaccg

SEQ ID NO: 2911 - DNA, 21 bp, Severe acute respiratory syndrome coronavirus 2
gagtgagggaaagcctaccga

SEQ ID NO: 2912 - DNA, 21 bp, Severe acute respiratory syndrome coronavirus 2
agtgagggaaagcctaccgaa

SEQ ID NO: 2913 - DNA, 21 bp, Severe acute respiratory syndrome coronavirus 2
ggctgctgctgatgatcgcac

SEQ ID NO: 2914 - DNA, 21 bp, Severe acute respiratory syndrome coronavirus 2
gctgctgctgatgatcgcacg

SEQ ID NO: 2915 - DNA, 21 bp, Severe acute respiratory syndrome coronavirus 2
ctgctgctgatgatcgcacgg

SEQ ID NO: 2916 - DNA, 21 bp, Severe acute respiratory syndrome coronavirus 2
tgctgctgatgatcgcacgga

SEQ ID NO: 2917 - DNA, 21 bp, Severe acute respiratory syndrome coronavirus 2
gctgctgatgatcgcacggaa

SEQ ID NO: 2918 - DNA, 21 bp, Severe acute respiratory syndrome coronavirus 2
ctgctgatgatcgcacggaaa

SEQ ID NO: 2919 - DNA, 21 bp, Severe acute respiratory syndrome coronavirus 2
tgctgatgatcgcacggaaac

SEQ ID NO: 2920 - DNA, 21 bp, Severe acute respiratory syndrome coronavirus 2
gctgatgatcgcacggaaaca

SEQ ID NO: 2921 - DNA, 21 bp, Severe acute respiratory syndrome coronavirus 2
ctgatgatcgcacggaaacat

SEQ ID NO: 2922 - DNA, 21 bp, Severe acute respiratory syndrome coronavirus 2
tgatgatcgcacggaaacatt

SEQ ID NO: 2923 - DNA, 21 bp, Severe acute respiratory syndrome coronavirus 2
gatgatcgcacggaaacattc

SEQ ID NO: 2924 - DNA, 21 bp, Severe acute respiratory syndrome coronavirus 2
atgatcgcacggaaacattcg

SEQ ID NO: 2925 - DNA, 21 bp, Severe acute respiratory syndrome coronavirus 2
tgatcgcacggaaacattcgt

SEQ ID NO: 2926 - DNA, 21 bp, Severe acute respiratory syndrome coronavirus 2
gatcgcacggaaacattcgtg

SEQ ID NO: 2927 - DNA, 21 bp, Severe acute respiratory syndrome coronavirus 2
atcgcacggaaacattcgtgt

SEQ ID NO: 2928 - DNA, 21 bp, Severe acute respiratory syndrome coronavirus 2
tcgcacggaaacattcgtgtt

SEQ ID NO: 2929 - DNA, 21 bp, Severe acute respiratory syndrome coronavirus 2
cgcacggaaacattcgtgttc

SEQ ID NO: 2930 - DNA, 21 bp, Severe acute respiratory syndrome coronavirus 2
actcatgcttgaatacatgag

SEQ ID NO: 2931 - DNA, 21 bp, Severe acute respiratory syndrome coronavirus 2
ctcatgcttgaatacatgagt

SEQ ID NO: 2932 - DNA, 21 bp, Severe acute respiratory syndrome coronavirus 2
tcatgcttgaatacatgagta

SEQ ID NO: 2933 - DNA, 21 bp, Severe acute respiratory syndrome coronavirus 2
catgcttgaatacatgagtaa

SEQ ID NO: 2934 - DNA, 21 bp, Severe acute respiratory syndrome coronavirus 2
atgcttgaatacatgagtaag

SEQ ID NO: 2935 - DNA, 21 bp, Severe acute respiratory syndrome coronavirus 2
tgcttgaatacatgagtaagc

SEQ ID NO: 2936 - DNA, 21 bp, Severe acute respiratory syndrome coronavirus 2
gcttgaatacatgagtaagca

SEQ ID NO: 2937 - DNA, 21 bp, Severe acute respiratory syndrome coronavirus 2
cttgaatacatgagtaagcaa

SEQ ID NO: 2938 - DNA, 21 bp, Severe acute respiratory syndrome coronavirus 2
ttgaatacatgagtaagcaaa

SEQ ID NO: 2939 - DNA, 21 bp, Severe acute respiratory syndrome coronavirus 2
tgaatacatgagtaagcaaag

SEQ ID NO: 2940 - DNA, 21 bp, Severe acute respiratory syndrome coronavirus 2
gaatacatgagtaagcaaagc

SEQ ID NO: 2941 - DNA, 21 bp, Severe acute respiratory syndrome coronavirus 2
aatacatgagtaagcaaagcc

SEQ ID NO: 2942 - DNA, 21 bp, Severe acute respiratory syndrome coronavirus 2
atacatgagtaagcaaagcct

SEQ ID NO: 2943 - DNA, 21 bp, Severe acute respiratory syndrome coronavirus 2
tacatgagtaagcaaagcctt

SEQ ID NO: 2944 - DNA, 21 bp, Severe acute respiratory syndrome coronavirus 2
acatgagtaagcaaagccttc

SEQ ID NO: 2945 - DNA, 21 bp, Severe acute respiratory syndrome coronavirus 2
catgagtaagcaaagccttct

SEQ ID NO: 2946 - DNA, 21 bp, Severe acute respiratory syndrome coronavirus 2
tgtccatgcaattatcaatta

SEQ ID NO: 2947 - DNA, 21 bp, Severe acute respiratory syndrome coronavirus 2
gtccatgcaattatcaattat

SEQ ID NO: 2948 - DNA, 21 bp, Severe acute respiratory syndrome coronavirus 2
tccatgcaattatcaattatc

SEQ ID NO: 2949 - DNA, 21 bp, Severe acute respiratory syndrome coronavirus 2
ccatgcaattatcaattatcg

SEQ ID NO: 2950 - DNA, 21 bp, Severe acute respiratory syndrome coronavirus 2
catgcaattatcaattatcgc

SEQ ID NO: 2951 - DNA, 21 bp, Severe acute respiratory syndrome coronavirus 2
atgcaattatcaattatcgca

SEQ ID NO: 2952 - DNA, 21 bp, Severe acute respiratory syndrome coronavirus 2
tgcaattatcaattatcgcat

SEQ ID NO: 2953 - DNA, 21 bp, Severe acute respiratory syndrome coronavirus 2
gcaattatcaattatcgcatg

SEQ ID NO: 2954 - DNA, 21 bp, Severe acute respiratory syndrome coronavirus 2
caattatcaattatcgcatga

SEQ ID NO: 2955 - DNA, 21 bp, Severe acute respiratory syndrome coronavirus 2
aattatcaattatcgcatgaa

SEQ ID NO: 2956 - DNA, 21 bp, Severe acute respiratory syndrome coronavirus 2
attatcaattatcgcatgaag

SEQ ID NO: 2957 - DNA, 21 bp, Severe acute respiratory syndrome coronavirus 2
ttatcaattatcgcatgaaga

SEQ ID NO: 2958 - DNA, 21 bp, Severe acute respiratory syndrome coronavirus 2
tatcaattatcgcatgaagaa

SEQ ID NO: 2959 - DNA, 21 bp, Severe acute respiratory syndrome coronavirus 2
atcaattatcgcatgaagaaa

SEQ ID NO: 2960 - DNA, 21 bp, Severe acute respiratory syndrome coronavirus 2
tcaattatcgcatgaagaaaa

SEQ ID NO: 2961 - DNA, 21 bp, Severe acute respiratory syndrome coronavirus 2
caattatcgcatgaagaaaaa

SEQ ID NO: 2962 - DNA, 21 bp, Severe acute respiratory syndrome coronavirus 2
aattatcgcatgaagaaaaag

SEQ ID NO: 2963 - DNA, 21 bp, Severe acute respiratory syndrome coronavirus 2
attatcgcatgaagaaaaaga

SEQ ID NO: 2964 - DNA, 21 bp, Severe acute respiratory syndrome coronavirus 2
ttatcgcatgaagaaaaagaa

SEQ ID NO: 2965 - DNA, 21 bp, Severe acute respiratory syndrome coronavirus 2
tatcgcatgaagaaaaagaac

SEQ ID NO: 2966 - DNA, 21 bp, Severe acute respiratory syndrome coronavirus 2
atcgcatgaagaaaaagaacg

SEQ ID NO: 2967 - DNA, 21 bp, Severe acute respiratory syndrome coronavirus 2
tcgcatgaagaaaaagaacga

SEQ ID NO: 2968 - DNA, 21 bp, Severe acute respiratory syndrome coronavirus 2
cgcatgaagaaaaagaacgaa

SEQ ID NO: 2969 - DNA, 21 bp, Severe acute respiratory syndrome coronavirus 2
gcatgaagaaaaagaacgaaa

SEQ ID NO: 2970 - DNA, 21 bp, Severe acute respiratory syndrome coronavirus 2
catgaagaaaaagaacgaaag

SEQ ID NO: 2971 - DNA, 21 bp, Severe acute respiratory syndrome coronavirus 2
atgaagaaaaagaacgaaagc

SEQ ID NO: 2972 - DNA, 21 bp, Severe acute respiratory syndrome coronavirus 2
tgaagaaaaagaacgaaagca

SEQ ID NO: 2973 - DNA, 21 bp, Severe acute respiratory syndrome coronavirus 2
gaagaaaaagaacgaaagcac

SEQ ID NO: 2974 - DNA, 21 bp, Severe acute respiratory syndrome coronavirus 2
aagaaaaagaacgaaagcacc

SEQ ID NO: 2975 - DNA, 21 bp, Severe acute respiratory syndrome coronavirus 2
agaaaaagaacgaaagcacca

SEQ ID NO: 2976 - DNA, 21 bp, Severe acute respiratory syndrome coronavirus 2
gaaaaagaacgaaagcaccat

SEQ ID NO: 2977 - DNA, 21 bp, Severe acute respiratory syndrome coronavirus 2
aaaaagaacgaaagcaccata

SEQ ID NO: 2978 - DNA, 21 bp, Severe acute respiratory syndrome coronavirus 2
aaaagaacgaaagcaccataa

SEQ ID NO: 2979 - DNA, 21 bp, Severe acute respiratory syndrome coronavirus 2
aaagaacgaaagcaccataag

SEQ ID NO: 2980 - DNA, 21 bp, Severe acute respiratory syndrome coronavirus 2
aagaacgaaagcaccataaga

SEQ ID NO: 2981 - DNA, 21 bp, Severe acute respiratory syndrome coronavirus 2
agaacgaaagcaccataagaa

SEQ ID NO: 2982 - DNA, 21 bp, Severe acute respiratory syndrome coronavirus 2
gaacgaaagcaccataagaac

SEQ ID NO: 2983 - DNA, 21 bp, Severe acute respiratory syndrome coronavirus 2
aacgaaagcaccataagaacg

SEQ ID NO: 2984 - DNA, 21 bp, Severe acute respiratory syndrome coronavirus 2
acgaaagcaccataagaacga

SEQ ID NO: 2985 - DNA, 21 bp, Severe acute respiratory syndrome coronavirus 2
cgaaagcaccataagaacgat

SEQ ID NO: 2986 - DNA, 21 bp, Severe acute respiratory syndrome coronavirus 2
gaaagcaccataagaacgatc

SEQ ID NO: 2987 - DNA, 21 bp, Severe acute respiratory syndrome coronavirus 2
aaagcaccataagaacgatca

SEQ ID NO: 2988 - DNA, 21 bp, Severe acute respiratory syndrome coronavirus 2
tgtgatcggtaggaatgacgc

SEQ ID NO: 2989 - DNA, 21 bp, Severe acute respiratory syndrome coronavirus 2
gtgatcggtaggaatgacgcg

SEQ ID NO: 2990 - DNA, 21 bp, Severe acute respiratory syndrome coronavirus 2
tgatcggtaggaatgacgcga

SEQ ID NO: 2991 - DNA, 21 bp, Severe acute respiratory syndrome coronavirus 2
gatcggtaggaatgacgcgaa

SEQ ID NO: 2992 - DNA, 21 bp, Severe acute respiratory syndrome coronavirus 2
atcggtaggaatgacgcgaag

SEQ ID NO: 2993 - DNA, 21 bp, Severe acute respiratory syndrome coronavirus 2
tcggtaggaatgacgcgaagc

SEQ ID NO: 2994 - DNA, 21 bp, Severe acute respiratory syndrome coronavirus 2
cggtaggaatgacgcgaagct

SEQ ID NO: 2995 - DNA, 21 bp, Severe acute respiratory syndrome coronavirus 2
ggtaggaatgacgcgaagcta

SEQ ID NO: 2996 - DNA, 21 bp, Severe acute respiratory syndrome coronavirus 2
gtaggaatgacgcgaagctaa

SEQ ID NO: 2997 - DNA, 21 bp, Severe acute respiratory syndrome coronavirus 2
taggaatgacgcgaagctaac

SEQ ID NO: 2998 - DNA, 21 bp, Severe acute respiratory syndrome coronavirus 2
aggaatgacgcgaagctaaca

SEQ ID NO: 2999 - DNA, 21 bp, Severe acute respiratory syndrome coronavirus 2
ggaatgacgcgaagctaacac

SEQ ID NO: 3000 - DNA, 21 bp, Severe acute respiratory syndrome coronavirus 2
gaatgacgcgaagctaacaca

SEQ ID NO: 3001 - DNA, 21 bp, Severe acute respiratory syndrome coronavirus 2
aatgacgcgaagctaacacac

SEQ ID NO: 3002 - DNA, 21 bp, Severe acute respiratory syndrome coronavirus 2
atgacgcgaagctaacacacg

SEQ ID NO: 3003 - DNA, 21 bp, Severe acute respiratory syndrome coronavirus 2
tgacgcgaagctaacacacgc

SEQ ID NO: 3004 - DNA, 21 bp, Severe acute respiratory syndrome coronavirus 2
gacgcgaagctaacacacgca

SEQ ID NO: 3005 - DNA, 21 bp, Severe acute respiratory syndrome coronavirus 2
acgcgaagctaacacacgcat

SEQ ID NO: 3006 - DNA, 21 bp, Severe acute respiratory syndrome coronavirus 2
cgcgaagctaacacacgcatg

SEQ ID NO: 3007 - DNA, 21 bp, Severe acute respiratory syndrome coronavirus 2
gcgaagctaacacacgcatga

SEQ ID NO: 3008 - DNA, 21 bp, Severe acute respiratory syndrome coronavirus 2
cgaagctaacacacgcatgac

SEQ ID NO: 3009 - DNA, 21 bp, Severe acute respiratory syndrome coronavirus 2
gaagctaacacacgcatgacg

SEQ ID NO: 3010 - DNA, 21 bp, Severe acute respiratory syndrome coronavirus 2
aagctaacacacgcatgacga

SEQ ID NO: 3011 - DNA, 21 bp, Severe acute respiratory syndrome coronavirus 2
agctaacacacgcatgacgac

SEQ ID NO: 3012 - DNA, 21 bp, Severe acute respiratory syndrome coronavirus 2
gctaacacacgcatgacgacg

SEQ ID NO: 3013 - DNA, 21 bp, Severe acute respiratory syndrome coronavirus 2
ctaacacacgcatgacgacgt

SEQ ID NO: 3014 - DNA, 21 bp, Severe acute respiratory syndrome coronavirus 2
taacacacgcatgacgacgtt

SEQ ID NO: 3015 - DNA, 21 bp, Severe acute respiratory syndrome coronavirus 2
aacacacgcatgacgacgtta

SEQ ID NO: 3016 - DNA, 21 bp, Severe acute respiratory syndrome coronavirus 2
acacacgcatgacgacgttat

SEQ ID NO: 3017 - DNA, 21 bp, Severe acute respiratory syndrome coronavirus 2
cacacgcatgacgacgttata

SEQ ID NO: 3018 - DNA, 21 bp, Severe acute respiratory syndrome coronavirus 2
acacgcatgacgacgttataa

SEQ ID NO: 3019 - DNA, 21 bp, Severe acute respiratory syndrome coronavirus 2
cacgcatgacgacgttataac

SEQ ID NO: 3020 - DNA, 21 bp, Severe acute respiratory syndrome coronavirus 2
acgcatgacgacgttataaca

SEQ ID NO: 3021 - DNA, 21 bp, Severe acute respiratory syndrome coronavirus 2
cgcatgacgacgttataacaa

SEQ ID NO: 3022 - DNA, 21 bp, Severe acute respiratory syndrome coronavirus 2
gcatgacgacgttataacaat

SEQ ID NO: 3023 - DNA, 21 bp, Severe acute respiratory syndrome coronavirus 2
catgacgacgttataacaatt

SEQ ID NO: 3024 - DNA, 21 bp, Severe acute respiratory syndrome coronavirus 2
atgacgacgttataacaattg

SEQ ID NO: 3025 - DNA, 21 bp, Severe acute respiratory syndrome coronavirus 2
tgacgacgttataacaattgc

SEQ ID NO: 3026 - DNA, 21 bp, Severe acute respiratory syndrome coronavirus 2
gacgacgttataacaattgca

SEQ ID NO: 3027 - DNA, 21 bp, Severe acute respiratory syndrome coronavirus 2
acgacgttataacaattgcac

SEQ ID NO: 3028 - DNA, 21 bp, Severe acute respiratory syndrome coronavirus 2
cgacgttataacaattgcact

SEQ ID NO: 3029 - DNA, 21 bp, Severe acute respiratory syndrome coronavirus 2
gacgttataacaattgcactc

SEQ ID NO: 3030 - DNA, 21 bp, Severe acute respiratory syndrome coronavirus 2
acgttataacaattgcactca

SEQ ID NO: 3031 - DNA, 21 bp, Severe acute respiratory syndrome coronavirus 2
ctcaaggactagaagaccaga

SEQ ID NO: 3032 - DNA, 21 bp, Severe acute respiratory syndrome coronavirus 2
tcaaggactagaagaccagat

SEQ ID NO: 3033 - DNA, 21 bp, Severe acute respiratory syndrome coronavirus 2
caaggactagaagaccagatt

SEQ ID NO: 3034 - DNA, 21 bp, Severe acute respiratory syndrome coronavirus 2
aaggactagaagaccagattt

SEQ ID NO: 3035 - DNA, 21 bp, Severe acute respiratory syndrome coronavirus 2
aggactagaagaccagatttg

SEQ ID NO: 3036 - DNA, 21 bp, Severe acute respiratory syndrome coronavirus 2
ggactagaagaccagatttgc

SEQ ID NO: 3037 - DNA, 21 bp, Severe acute respiratory syndrome coronavirus 2
gactagaagaccagatttgct

SEQ ID NO: 3038 - DNA, 21 bp, Severe acute respiratory syndrome coronavirus 2
actagaagaccagatttgctt

SEQ ID NO: 3039 - DNA, 21 bp, Severe acute respiratory syndrome coronavirus 2
ctagaagaccagatttgcttg

SEQ ID NO: 3040 - DNA, 21 bp, Severe acute respiratory syndrome coronavirus 2
tagaagaccagatttgcttga

SEQ ID NO: 3041 - DNA, 21 bp, Severe acute respiratory syndrome coronavirus 2
agaagaccagatttgcttgat

SEQ ID NO: 3042 - DNA, 21 bp, Severe acute respiratory syndrome coronavirus 2
gaagaccagatttgcttgatt

SEQ ID NO: 3043 - DNA, 21 bp, Severe acute respiratory syndrome coronavirus 2
cttgttaccttggatcattat

SEQ ID NO: 3044 - DNA, 21 bp, Severe acute respiratory syndrome coronavirus 2
ttgttaccttggatcattatc

SEQ ID NO: 3045 - DNA, 21 bp, Severe acute respiratory syndrome coronavirus 2
tgttaccttggatcattatcc

SEQ ID NO: 3046 - DNA, 21 bp, Severe acute respiratory syndrome coronavirus 2
gttaccttggatcattatcca

SEQ ID NO: 3047 - DNA, 21 bp, Severe acute respiratory syndrome coronavirus 2
ttaccttggatcattatccaa

SEQ ID NO: 3048 - DNA, 21 bp, Severe acute respiratory syndrome coronavirus 2
taccttggatcattatccaaa

SEQ ID NO: 3049 - DNA, 21 bp, Severe acute respiratory syndrome coronavirus 2
accttggatcattatccaaag

SEQ ID NO: 3050 - DNA, 21 bp, Severe acute respiratory syndrome coronavirus 2
cgatgtagtgcttgcgaaaga

SEQ ID NO: 3051 - DNA, 21 bp, Severe acute respiratory syndrome coronavirus 2
gatgtagtgcttgcgaaagaa

SEQ ID NO: 3052 - DNA, 21 bp, Severe acute respiratory syndrome coronavirus 2
atgtagtgcttgcgaaagaat

SEQ ID NO: 3053 - DNA, 21 bp, Severe acute respiratory syndrome coronavirus 2
tgtagtgcttgcgaaagaata

SEQ ID NO: 3054 - DNA, 21 bp, Severe acute respiratory syndrome coronavirus 2
gtagtgcttgcgaaagaataa

SEQ ID NO: 3055 - DNA, 21 bp, Severe acute respiratory syndrome coronavirus 2
tagtgcttgcgaaagaataat

SEQ ID NO: 3056 - DNA, 21 bp, Severe acute respiratory syndrome coronavirus 2
agtgcttgcgaaagaataatg

SEQ ID NO: 3057 - DNA, 21 bp, Severe acute respiratory syndrome coronavirus 2
gtgcttgcgaaagaataatgt

SEQ ID NO: 3058 - DNA, 21 bp, Severe acute respiratory syndrome coronavirus 2
tgcttgcgaaagaataatgtt

SEQ ID NO: 3059 - DNA, 21 bp, Severe acute respiratory syndrome coronavirus 2
gcttgcgaaagaataatgttt

SEQ ID NO: 3060 - DNA, 21 bp, Severe acute respiratory syndrome coronavirus 2
cttgcgaaagaataatgttta

SEQ ID NO: 3061 - DNA, 21 bp, Severe acute respiratory syndrome coronavirus 2
ttgcgaaagaataatgtttaa

SEQ ID NO: 3062 - DNA, 21 bp, Severe acute respiratory syndrome coronavirus 2
catgtcattcactgttgtcta

SEQ ID NO: 3063 - DNA, 21 bp, Severe acute respiratory syndrome coronavirus 2
atgtcattcactgttgtctac

SEQ ID NO: 3064 - DNA, 21 bp, Severe acute respiratory syndrome coronavirus 2
tgtcattcactgttgtctaca

SEQ ID NO: 3065 - DNA, 21 bp, Severe acute respiratory syndrome coronavirus 2
gtcattcactgttgtctacaa

SEQ ID NO: 3066 - DNA, 21 bp, Severe acute respiratory syndrome coronavirus 2
tcattcactgttgtctacaaa

SEQ ID NO: 3067 - DNA, 21 bp, Severe acute respiratory syndrome coronavirus 2
cattcactgttgtctacaaag

SEQ ID NO: 3068 - DNA, 21 bp, Severe acute respiratory syndrome coronavirus 2
attcactgttgtctacaaagt

SEQ ID NO: 3069 - DNA, 21 bp, Severe acute respiratory syndrome coronavirus 2
ttcactgttgtctacaaagta

SEQ ID NO: 3070 - DNA, 21 bp, Severe acute respiratory syndrome coronavirus 2
tcactgttgtctacaaagtag

SEQ ID NO: 3071 - DNA, 21 bp, Severe acute respiratory syndrome coronavirus 2
cactgttgtctacaaagtaga

SEQ ID NO: 3072 - DNA, 21 bp, Severe acute respiratory syndrome coronavirus 2
ctaatttgcttgtacttttaa

SEQ ID NO: 3073 - DNA, 21 bp, Severe acute respiratory syndrome coronavirus 2
taatttgcttgtacttttaat

SEQ ID NO: 3074 - DNA, 21 bp, Severe acute respiratory syndrome coronavirus 2
aatttgcttgtacttttaata

SEQ ID NO: 3075 - DNA, 21 bp, Severe acute respiratory syndrome coronavirus 2
atttgcttgtacttttaataa

SEQ ID NO: 3076 - DNA, 21 bp, Severe acute respiratory syndrome coronavirus 2
tttgcttgtacttttaataag

SEQ ID NO: 3077 - DNA, 21 bp, Severe acute respiratory syndrome coronavirus 2
ttgcttgtacttttaataaga

SEQ ID NO: 3078 - DNA, 21 bp, Severe acute respiratory syndrome coronavirus 2
atgctcccgttaagtggtaaa

SEQ ID NO: 3079 - DNA, 21 bp, Severe acute respiratory syndrome coronavirus 2
tgctcccgttaagtggtaaag

SEQ ID NO: 3080 - DNA, 21 bp, Severe acute respiratory syndrome coronavirus 2
gctcccgttaagtggtaaagt

SEQ ID NO: 3081 - DNA, 21 bp, Severe acute respiratory syndrome coronavirus 2
aattaactgaagataaacacg

SEQ ID NO: 3082 - DNA, 21 bp, Severe acute respiratory syndrome coronavirus 2
attaactgaagataaacacga

SEQ ID NO: 3083 - DNA, 21 bp, Severe acute respiratory syndrome coronavirus 2
ttaactgaagataaacacgaa

SEQ ID NO: 3084 - DNA, 21 bp, Severe acute respiratory syndrome coronavirus 2
taactgaagataaacacgaaa

SEQ ID NO: 3085 - DNA, 21 bp, Severe acute respiratory syndrome coronavirus 2
aactgaagataaacacgaaaa

SEQ ID NO: 3086 - DNA, 21 bp, Severe acute respiratory syndrome coronavirus 2
actgaagataaacacgaaaaa

SEQ ID NO: 3087 - DNA, 21 bp, Severe acute respiratory syndrome coronavirus 2
ctgaagataaacacgaaaaat

SEQ ID NO: 3088 - DNA, 21 bp, Severe acute respiratory syndrome coronavirus 2
tgaagataaacacgaaaaatc

SEQ ID NO: 3089 - DNA, 21 bp, Severe acute respiratory syndrome coronavirus 2
gaagataaacacgaaaaatcg

SEQ ID NO: 3090 - DNA, 21 bp, Severe acute respiratory syndrome coronavirus 2
aagataaacacgaaaaatcgg

SEQ ID NO: 3091 - DNA, 21 bp, Severe acute respiratory syndrome coronavirus 2
agataaacacgaaaaatcgga

SEQ ID NO: 3092 - DNA, 21 bp, Severe acute respiratory syndrome coronavirus 2
gataaacacgaaaaatcggaa

SEQ ID NO: 3093 - DNA, 21 bp, Severe acute respiratory syndrome coronavirus 2
ataaacacgaaaaatcggaaa

SEQ ID NO: 3094 - DNA, 21 bp, Severe acute respiratory syndrome coronavirus 2
taaacacgaaaaatcggaaag

SEQ ID NO: 3095 - DNA, 21 bp, Severe acute respiratory syndrome coronavirus 2
aaacacgaaaaatcggaaaga

SEQ ID NO: 3096 - DNA, 21 bp, Severe acute respiratory syndrome coronavirus 2
aacacgaaaaatcggaaagac

SEQ ID NO: 3097 - DNA, 21 bp, Severe acute respiratory syndrome coronavirus 2
acacgaaaaatcggaaagacg

SEQ ID NO: 3098 - DNA, 21 bp, Severe acute respiratory syndrome coronavirus 2
cacgaaaaatcggaaagacga

SEQ ID NO: 3099 - DNA, 21 bp, Severe acute respiratory syndrome coronavirus 2
acgaaaaatcggaaagacgat

SEQ ID NO: 3100 - DNA, 21 bp, Severe acute respiratory syndrome coronavirus 2
cgaaaaatcggaaagacgata

SEQ ID NO: 3101 - DNA, 21 bp, Severe acute respiratory syndrome coronavirus 2
gaaaaatcggaaagacgataa

SEQ ID NO: 3102 - DNA, 21 bp, Severe acute respiratory syndrome coronavirus 2
aaaaatcggaaagacgataag

SEQ ID NO: 3103 - DNA, 21 bp, Severe acute respiratory syndrome coronavirus 2
aaaatcggaaagacgataagg

SEQ ID NO: 3104 - DNA, 21 bp, Severe acute respiratory syndrome coronavirus 2
aaatcggaaagacgataagga

SEQ ID NO: 3105 - DNA, 21 bp, Severe acute respiratory syndrome coronavirus 2
aatcggaaagacgataaggaa

SEQ ID NO: 3106 - DNA, 21 bp, Severe acute respiratory syndrome coronavirus 2
atcggaaagacgataaggaac

SEQ ID NO: 3107 - DNA, 21 bp, Severe acute respiratory syndrome coronavirus 2
tcggaaagacgataaggaaca

SEQ ID NO: 3108 - DNA, 21 bp, Severe acute respiratory syndrome coronavirus 2
cggaaagacgataaggaacaa

SEQ ID NO: 3109 - DNA, 21 bp, Severe acute respiratory syndrome coronavirus 2
attttacagactattacctgg

SEQ ID NO: 3110 - DNA, 21 bp, Severe acute respiratory syndrome coronavirus 2
ttttacagactattacctggg

SEQ ID NO: 3111 - DNA, 21 bp, Severe acute respiratory syndrome coronavirus 2
tttacagactattacctgggg

SEQ ID NO: 3112 - DNA, 21 bp, Severe acute respiratory syndrome coronavirus 2
ttacagactattacctggggt

SEQ ID NO: 3113 - DNA, 21 bp, Severe acute respiratory syndrome coronavirus 2
tacagactattacctggggtt

SEQ ID NO: 3114 - DNA, 21 bp, Severe acute respiratory syndrome coronavirus 2
acagactattacctggggttt

SEQ ID NO: 3115 - DNA, 21 bp, Severe acute respiratory syndrome coronavirus 2
cagactattacctggggtttt

SEQ ID NO: 3116 - DNA, 21 bp, Severe acute respiratory syndrome coronavirus 2
ggggttccaaatgggttatta

SEQ ID NO: 3117 - DNA, 21 bp, Severe acute respiratory syndrome coronavirus 2
gggttccaaatgggttattat

SEQ ID NO: 3118 - DNA, 21 bp, Severe acute respiratory syndrome coronavirus 2
ggttccaaatgggttattatg

SEQ ID NO: 3119 - DNA, 21 bp, Severe acute respiratory syndrome coronavirus 2
gttccaaatgggttattatga

SEQ ID NO: 3120 - DNA, 21 bp, Severe acute respiratory syndrome coronavirus 2
ttccaaatgggttattatgac

SEQ ID NO: 3121 - DNA, 21 bp, Severe acute respiratory syndrome coronavirus 2
tccaaatgggttattatgacg

SEQ ID NO: 3122 - DNA, 21 bp, Severe acute respiratory syndrome coronavirus 2
ccaaatgggttattatgacgc

SEQ ID NO: 3123 - DNA, 21 bp, Severe acute respiratory syndrome coronavirus 2
caaatgggttattatgacgca

SEQ ID NO: 3124 - DNA, 21 bp, Severe acute respiratory syndrome coronavirus 2
aaatgggttattatgacgcag

SEQ ID NO: 3125 - DNA, 21 bp, Severe acute respiratory syndrome coronavirus 2
aatgggttattatgacgcaga

SEQ ID NO: 3126 - DNA, 21 bp, Severe acute respiratory syndrome coronavirus 2
atgggttattatgacgcagaa

SEQ ID NO: 3127 - DNA, 21 bp, Severe acute respiratory syndrome coronavirus 2
tgggttattatgacgcagaac

SEQ ID NO: 3128 - DNA, 21 bp, Severe acute respiratory syndrome coronavirus 2
gggttattatgacgcagaacc

SEQ ID NO: 3129 - DNA, 21 bp, Severe acute respiratory syndrome coronavirus 2
ggttattatgacgcagaacca

SEQ ID NO: 3130 - DNA, 21 bp, Severe acute respiratory syndrome coronavirus 2
gttattatgacgcagaaccaa

SEQ ID NO: 3131 - DNA, 21 bp, Severe acute respiratory syndrome coronavirus 2
ttattatgacgcagaaccaag

SEQ ID NO: 3132 - DNA, 21 bp, Severe acute respiratory syndrome coronavirus 2
tattatgacgcagaaccaagt

SEQ ID NO: 3133 - DNA, 21 bp, Severe acute respiratory syndrome coronavirus 2
attatgacgcagaaccaagtg

SEQ ID NO: 3134 - DNA, 21 bp, Severe acute respiratory syndrome coronavirus 2
tctactggtttaaccgatgat

SEQ ID NO: 3135 - DNA, 21 bp, Severe acute respiratory syndrome coronavirus 2
ctactggtttaaccgatgatg

SEQ ID NO: 3136 - DNA, 21 bp, Severe acute respiratory syndrome coronavirus 2
tactggtttaaccgatgatgg

SEQ ID NO: 3137 - DNA, 21 bp, Severe acute respiratory syndrome coronavirus 2
actggtttaaccgatgatggc

SEQ ID NO: 3138 - DNA, 21 bp, Severe acute respiratory syndrome coronavirus 2
ctggtttaaccgatgatggct

SEQ ID NO: 3139 - DNA, 21 bp, Severe acute respiratory syndrome coronavirus 2
tggtttaaccgatgatggctt

SEQ ID NO: 3140 - DNA, 21 bp, Severe acute respiratory syndrome coronavirus 2
ggtttaaccgatgatggcttc

SEQ ID NO: 3141 - DNA, 21 bp, Severe acute respiratory syndrome coronavirus 2
gtttaaccgatgatggcttct

SEQ ID NO: 3142 - DNA, 21 bp, Severe acute respiratory syndrome coronavirus 2
tttaaccgatgatggcttctc

SEQ ID NO: 3143 - DNA, 21 bp, Severe acute respiratory syndrome coronavirus 2
ttaaccgatgatggcttctcg

SEQ ID NO: 3144 - DNA, 21 bp, Severe acute respiratory syndrome coronavirus 2
taaccgatgatggcttctcga

SEQ ID NO: 3145 - DNA, 21 bp, Severe acute respiratory syndrome coronavirus 2
aaccgatgatggcttctcgat

SEQ ID NO: 3146 - DNA, 21 bp, Severe acute respiratory syndrome coronavirus 2
accgatgatggcttctcgatg

SEQ ID NO: 3147 - DNA, 21 bp, Severe acute respiratory syndrome coronavirus 2
ccgatgatggcttctcgatgg

SEQ ID NO: 3148 - DNA, 21 bp, Severe acute respiratory syndrome coronavirus 2
gtgtaaccgtgggcgttagga

SEQ ID NO: 3149 - DNA, 21 bp, Severe acute respiratory syndrome coronavirus 2
gcacgatgttgaaggagttcc

SEQ ID NO: 3150 - DNA, 21 bp, Severe acute respiratory syndrome coronavirus 2
cacgatgttgaaggagttcct

SEQ ID NO: 3151 - DNA, 21 bp, Severe acute respiratory syndrome coronavirus 2
acgatgttgaaggagttcctt

SEQ ID NO: 3152 - DNA, 21 bp, Severe acute respiratory syndrome coronavirus 2
cgatgttgaaggagttccttg

SEQ ID NO: 3153 - DNA, 21 bp, Severe acute respiratory syndrome coronavirus 2
gatgttgaaggagttccttgt

SEQ ID NO: 3154 - DNA, 21 bp, Severe acute respiratory syndrome coronavirus 2
atgttgaaggagttccttgtt

SEQ ID NO: 3155 - DNA, 21 bp, Severe acute respiratory syndrome coronavirus 2
tgttgaaggagttccttgttg

SEQ ID NO: 3156 - DNA, 21 bp, Severe acute respiratory syndrome coronavirus 2
gttgaaggagttccttgttgt

SEQ ID NO: 3157 - DNA, 21 bp, Severe acute respiratory syndrome coronavirus 2
ttgaaggagttccttgttgta

SEQ ID NO: 3158 - DNA, 21 bp, Severe acute respiratory syndrome coronavirus 2
tgaaggagttccttgttgtaa

SEQ ID NO: 3159 - DNA, 21 bp, Severe acute respiratory syndrome coronavirus 2
gaaggagttccttgttgtaac

SEQ ID NO: 3160 - DNA, 21 bp, Severe acute respiratory syndrome coronavirus 2
aaggagttccttgttgtaacg

SEQ ID NO: 3161 - DNA, 21 bp, Severe acute respiratory syndrome coronavirus 2
aggagttccttgttgtaacgg

SEQ ID NO: 3162 - DNA, 21 bp, Severe acute respiratory syndrome coronavirus 2
ggagttccttgttgtaacggt

SEQ ID NO: 3163 - DNA, 21 bp, Severe acute respiratory syndrome coronavirus 2
gagttccttgttgtaacggtt

SEQ ID NO: 3164 - DNA, 21 bp, Severe acute respiratory syndrome coronavirus 2
agttccttgttgtaacggttt

SEQ ID NO: 3165 - DNA, 21 bp, Severe acute respiratory syndrome coronavirus 2
gttccttgttgtaacggtttt

SEQ ID NO: 3166 - DNA, 21 bp, Severe acute respiratory syndrome coronavirus 2
ttccttgttgtaacggttttc

SEQ ID NO: 3167 - DNA, 21 bp, Severe acute respiratory syndrome coronavirus 2
tccttgttgtaacggttttcc

SEQ ID NO: 3168 - DNA, 21 bp, Severe acute respiratory syndrome coronavirus 2
ccttgttgtaacggttttccg

SEQ ID NO: 3169 - DNA, 21 bp, Severe acute respiratory syndrome coronavirus 2
cttgttgtaacggttttccga

SEQ ID NO: 3170 - DNA, 21 bp, Severe acute respiratory syndrome coronavirus 2
ttgttgtaacggttttccgaa

SEQ ID NO: 3171 - DNA, 21 bp, Severe acute respiratory syndrome coronavirus 2
tgttgtaacggttttccgaag

SEQ ID NO: 3172 - DNA, 21 bp, Severe acute respiratory syndrome coronavirus 2
gttgtaacggttttccgaaga

SEQ ID NO: 3173 - DNA, 21 bp, Severe acute respiratory syndrome coronavirus 2
ttgtaacggttttccgaagat

SEQ ID NO: 3174 - DNA, 21 bp, Severe acute respiratory syndrome coronavirus 2
tgtaacggttttccgaagatg

SEQ ID NO: 3175 - DNA, 21 bp, Severe acute respiratory syndrome coronavirus 2
gtaacggttttccgaagatgc

SEQ ID NO: 3176 - DNA, 21 bp, Severe acute respiratory syndrome coronavirus 2
taacggttttccgaagatgcg

SEQ ID NO: 3177 - DNA, 21 bp, Severe acute respiratory syndrome coronavirus 2
aacggttttccgaagatgcgt

SEQ ID NO: 3178 - DNA, 21 bp, Severe acute respiratory syndrome coronavirus 2
acggttttccgaagatgcgtc

SEQ ID NO: 3179 - DNA, 21 bp, Severe acute respiratory syndrome coronavirus 2
cggttttccgaagatgcgtct

SEQ ID NO: 3180 - DNA, 21 bp, Severe acute respiratory syndrome coronavirus 2
tcgtctccgccgtcagttcgg

SEQ ID NO: 3181 - DNA, 21 bp, Severe acute respiratory syndrome coronavirus 2
cgtctccgccgtcagttcgga

SEQ ID NO: 3182 - DNA, 21 bp, Severe acute respiratory syndrome coronavirus 2
gtctccgccgtcagttcggag

SEQ ID NO: 3183 - DNA, 21 bp, Severe acute respiratory syndrome coronavirus 2
tctccgccgtcagttcggaga

SEQ ID NO: 3184 - DNA, 21 bp, Severe acute respiratory syndrome coronavirus 2
ctccgccgtcagttcggagaa

SEQ ID NO: 3185 - DNA, 21 bp, Severe acute respiratory syndrome coronavirus 2
tccgccgtcagttcggagaag

SEQ ID NO: 3186 - DNA, 21 bp, Severe acute respiratory syndrome coronavirus 2
ccgccgtcagttcggagaaga

SEQ ID NO: 3187 - DNA, 21 bp, Severe acute respiratory syndrome coronavirus 2
cgccgtcagttcggagaagag

SEQ ID NO: 3188 - DNA, 21 bp, Severe acute respiratory syndrome coronavirus 2
gccgtcagttcggagaagagc

SEQ ID NO: 3189 - DNA, 21 bp, Severe acute respiratory syndrome coronavirus 2
ctgtctaacttggtcgaactc

SEQ ID NO: 3190 - DNA, 21 bp, Severe acute respiratory syndrome coronavirus 2
tgtctaacttggtcgaactct

SEQ ID NO: 3191 - DNA, 21 bp, Severe acute respiratory syndrome coronavirus 2
gtctaacttggtcgaactctc

SEQ ID NO: 3192 - DNA, 21 bp, Severe acute respiratory syndrome coronavirus 2
tctaacttggtcgaactctcg

SEQ ID NO: 3193 - DNA, 21 bp, Severe acute respiratory syndrome coronavirus 2
ctaacttggtcgaactctcgt

SEQ ID NO: 3194 - DNA, 21 bp, Severe acute respiratory syndrome coronavirus 2
taacttggtcgaactctcgtt

SEQ ID NO: 3195 - DNA, 21 bp, Severe acute respiratory syndrome coronavirus 2
aacttggtcgaactctcgttt

SEQ ID NO: 3196 - DNA, 21 bp, Severe acute respiratory syndrome coronavirus 2
agaccatttccggttgttgtt

SEQ ID NO: 3197 - DNA, 21 bp, Severe acute respiratory syndrome coronavirus 2
gaccatttccggttgttgttg

SEQ ID NO: 3198 - DNA, 21 bp, Severe acute respiratory syndrome coronavirus 2
accatttccggttgttgttgt

SEQ ID NO: 3199 - DNA, 21 bp, Severe acute respiratory syndrome coronavirus 2
ccatttccggttgttgttgtt

SEQ ID NO: 3200 - DNA, 21 bp, Severe acute respiratory syndrome coronavirus 2
catttccggttgttgttgttc

SEQ ID NO: 3201 - DNA, 21 bp, Severe acute respiratory syndrome coronavirus 2
atttccggttgttgttgttcc

SEQ ID NO: 3202 - DNA, 21 bp, Severe acute respiratory syndrome coronavirus 2
tttccggttgttgttgttccg

SEQ ID NO: 3203 - DNA, 21 bp, Severe acute respiratory syndrome coronavirus 2
ttccggttgttgttgttccgg

SEQ ID NO: 3204 - DNA, 21 bp, Severe acute respiratory syndrome coronavirus 2
tccggttgttgttgttccggt

SEQ ID NO: 3205 - DNA, 21 bp, Severe acute respiratory syndrome coronavirus 2
ccggttgttgttgttccggtt

SEQ ID NO: 3206 - DNA, 21 bp, Severe acute respiratory syndrome coronavirus 2
cggttgttgttgttccggttt

SEQ ID NO: 3207 - DNA, 21 bp, Severe acute respiratory syndrome coronavirus 2
ggttgttgttgttccggtttg

SEQ ID NO: 3208 - DNA, 21 bp, Severe acute respiratory syndrome coronavirus 2
gttgttgttgttccggtttga

SEQ ID NO: 3209 - DNA, 21 bp, Severe acute respiratory syndrome coronavirus 2
ttgttgttgttccggtttgac

SEQ ID NO: 3210 - DNA, 21 bp, Severe acute respiratory syndrome coronavirus 2
tgttgttgttccggtttgaca

SEQ ID NO: 3211 - DNA, 21 bp, Severe acute respiratory syndrome coronavirus 2
gttgttgttccggtttgacag

SEQ ID NO: 3212 - DNA, 21 bp, Severe acute respiratory syndrome coronavirus 2
ttgttgttccggtttgacagt

SEQ ID NO: 3213 - DNA, 21 bp, Severe acute respiratory syndrome coronavirus 2
tgttgttccggtttgacagtg

SEQ ID NO: 3214 - DNA, 21 bp, Severe acute respiratory syndrome coronavirus 2
gttgttccggtttgacagtga

SEQ ID NO: 3215 - DNA, 21 bp, Severe acute respiratory syndrome coronavirus 2
ttgttccggtttgacagtgat

SEQ ID NO: 3216 - DNA, 21 bp, Severe acute respiratory syndrome coronavirus 2
tgttccggtttgacagtgatt

SEQ ID NO: 3217 - DNA, 21 bp, Severe acute respiratory syndrome coronavirus 2
gttccggtttgacagtgattc

SEQ ID NO: 3218 - DNA, 21 bp, Severe acute respiratory syndrome coronavirus 2
ttccggtttgacagtgattct

SEQ ID NO: 3219 - DNA, 21 bp, Severe acute respiratory syndrome coronavirus 2
tccggtttgacagtgattctt

SEQ ID NO: 3220 - DNA, 21 bp, Severe acute respiratory syndrome coronavirus 2
ccggtttgacagtgattcttt

SEQ ID NO: 3221 - DNA, 21 bp, Severe acute respiratory syndrome coronavirus 2
cggtttgacagtgattcttta

SEQ ID NO: 3222 - DNA, 21 bp, Severe acute respiratory syndrome coronavirus 2
ggtttgacagtgattctttag

SEQ ID NO: 3223 - DNA, 21 bp, Severe acute respiratory syndrome coronavirus 2
gtttgacagtgattctttaga

SEQ ID NO: 3224 - DNA, 21 bp, Severe acute respiratory syndrome coronavirus 2
tttgacagtgattctttagac

SEQ ID NO: 3225 - DNA, 21 bp, Severe acute respiratory syndrome coronavirus 2
ttgacagtgattctttagacg

SEQ ID NO: 3226 - DNA, 21 bp, Severe acute respiratory syndrome coronavirus 2
tgacagtgattctttagacga

SEQ ID NO: 3227 - DNA, 21 bp, Severe acute respiratory syndrome coronavirus 2
gacagtgattctttagacgac

SEQ ID NO: 3228 - DNA, 21 bp, Severe acute respiratory syndrome coronavirus 2
acagtgattctttagacgacg

SEQ ID NO: 3229 - DNA, 21 bp, Severe acute respiratory syndrome coronavirus 2
cagtgattctttagacgacga

SEQ ID NO: 3230 - DNA, 21 bp, Severe acute respiratory syndrome coronavirus 2
agtgattctttagacgacgac

SEQ ID NO: 3231 - DNA, 21 bp, Severe acute respiratory syndrome coronavirus 2
gtgattctttagacgacgact

SEQ ID NO: 3232 - DNA, 21 bp, Severe acute respiratory syndrome coronavirus 2
tgattctttagacgacgactc

SEQ ID NO: 3233 - DNA, 21 bp, Severe acute respiratory syndrome coronavirus 2
gattctttagacgacgactcc

SEQ ID NO: 3234 - DNA, 21 bp, Severe acute respiratory syndrome coronavirus 2
attctttagacgacgactccg

SEQ ID NO: 3235 - DNA, 21 bp, Severe acute respiratory syndrome coronavirus 2
gattagtctgttccttgacta

SEQ ID NO: 3236 - DNA, 21 bp, Severe acute respiratory syndrome coronavirus 2
attagtctgttccttgactaa

SEQ ID NO: 3237 - DNA, 21 bp, Severe acute respiratory syndrome coronavirus 2
ttagtctgttccttgactaat

SEQ ID NO: 3238 - DNA, 21 bp, Severe acute respiratory syndrome coronavirus 2
tagtctgttccttgactaatg

SEQ ID NO: 3239 - DNA, 21 bp, Severe acute respiratory syndrome coronavirus 2
agtctgttccttgactaatgt

SEQ ID NO: 3240 - DNA, 21 bp, Severe acute respiratory syndrome coronavirus 2
gtctgttccttgactaatgtt

SEQ ID NO: 3241 - DNA, 21 bp, Severe acute respiratory syndrome coronavirus 2
tctgttccttgactaatgttt

SEQ ID NO: 3242 - DNA, 21 bp, Severe acute respiratory syndrome coronavirus 2
ctgttccttgactaatgtttg

SEQ ID NO: 3243 - DNA, 21 bp, Severe acute respiratory syndrome coronavirus 2
tgttccttgactaatgtttgt

SEQ ID NO: 3244 - DNA, 21 bp, Severe acute respiratory syndrome coronavirus 2
accggcgtttaacgtgttaaa

SEQ ID NO: 3245 - DNA, 21 bp, Severe acute respiratory syndrome coronavirus 2
ccggcgtttaacgtgttaaac

SEQ ID NO: 3246 - DNA, 21 bp, Severe acute respiratory syndrome coronavirus 2
cggcgtttaacgtgttaaacg

SEQ ID NO: 3247 - DNA, 21 bp, Severe acute respiratory syndrome coronavirus 2
gcgtaaccgtaccttcagtgt

SEQ ID NO: 3248 - DNA, 21 bp, Severe acute respiratory syndrome coronavirus 2
cgtaaccgtaccttcagtgtg

SEQ ID NO: 3249 - DNA, 21 bp, Severe acute respiratory syndrome coronavirus 2
gtaaccgtaccttcagtgtgg

SEQ ID NO: 3250 - DNA, 21 bp, Severe acute respiratory syndrome coronavirus 2
taaccgtaccttcagtgtgga

SEQ ID NO: 3251 - DNA, 21 bp, Severe acute respiratory syndrome coronavirus 2
aaccgtaccttcagtgtggaa

SEQ ID NO: 3252 - DNA, 21 bp, Severe acute respiratory syndrome coronavirus 2
accgtaccttcagtgtggaag

SEQ ID NO: 3253 - DNA, 21 bp, Severe acute respiratory syndrome coronavirus 2
ccgtaccttcagtgtggaagc

SEQ ID NO: 3254 - DNA, 21 bp, Severe acute respiratory syndrome coronavirus 2
cgtaccttcagtgtggaagcc

SEQ ID NO: 3255 - DNA, 21 bp, Severe acute respiratory syndrome coronavirus 2
gtaccttcagtgtggaagccc

SEQ ID NO: 3256 - DNA, 21 bp, Severe acute respiratory syndrome coronavirus 2
taccttcagtgtggaagccct

SEQ ID NO: 3257 - DNA, 21 bp, Severe acute respiratory syndrome coronavirus 2
accttcagtgtggaagccctt

SEQ ID NO: 3258 - DNA, 21 bp, Severe acute respiratory syndrome coronavirus 2
ccttcagtgtggaagcccttg

SEQ ID NO: 3259 - DNA, 21 bp, Severe acute respiratory syndrome coronavirus 2
tttaacctactgtttctaggt

SEQ ID NO: 3260 - DNA, 21 bp, Severe acute respiratory syndrome coronavirus 2
taactgcgtatgttttgtaag

SEQ ID NO: 3261 - DNA, 21 bp, Severe acute respiratory syndrome coronavirus 2
aactgcgtatgttttgtaagg

SEQ ID NO: 3262 - DNA, 21 bp, Severe acute respiratory syndrome coronavirus 2
actgcgtatgttttgtaaggg

SEQ ID NO: 3263 - DNA, 21 bp, Severe acute respiratory syndrome coronavirus 2
ctgcgtatgttttgtaagggt

SEQ ID NO: 3264 - DNA, 21 bp, Severe acute respiratory syndrome coronavirus 2
tgcgtatgttttgtaagggtg

SEQ ID NO: 3265 - DNA, 21 bp, Severe acute respiratory syndrome coronavirus 2
gcgtatgttttgtaagggtgg

SEQ ID NO: 3266 - DNA, 21 bp, Severe acute respiratory syndrome coronavirus 2
cgtatgttttgtaagggtggt

SEQ ID NO: 3267 - DNA, 21 bp, Severe acute respiratory syndrome coronavirus 2
gtatgttttgtaagggtggtt

SEQ ID NO: 3268 - DNA, 21 bp, Severe acute respiratory syndrome coronavirus 2
tatgttttgtaagggtggttg

SEQ ID NO: 3269 - DNA, 21 bp, Severe acute respiratory syndrome coronavirus 2
atgttttgtaagggtggttgt

SEQ ID NO: 3270 - DNA, 21 bp, Severe acute respiratory syndrome coronavirus 2
tgttttgtaagggtggttgtc

SEQ ID NO: 3271 - DNA, 21 bp, Severe acute respiratory syndrome coronavirus 2
gttttgtaagggtggttgtct

SEQ ID NO: 3272 - DNA, 21 bp, Severe acute respiratory syndrome coronavirus 2
ttttgtaagggtggttgtctc

SEQ ID NO: 3273 - DNA, 21 bp, Severe acute respiratory syndrome coronavirus 2
tttgtaagggtggttgtctcg

SEQ ID NO: 3274 - DNA, 21 bp, Severe acute respiratory syndrome coronavirus 2
ttgtaagggtggttgtctcgg

SEQ ID NO: 3275 - DNA, 21 bp, Severe acute respiratory syndrome coronavirus 2
tgtaagggtggttgtctcgga

SEQ ID NO: 3276 - DNA, 21 bp, Severe acute respiratory syndrome coronavirus 2
gtaagggtggttgtctcggat

SEQ ID NO: 3277 - DNA, 21 bp, Severe acute respiratory syndrome coronavirus 2
taagggtggttgtctcggatt

SEQ ID NO: 3278 - DNA, 21 bp, Severe acute respiratory syndrome coronavirus 2
aagggtggttgtctcggattt

SEQ ID NO: 3279 - DNA, 21 bp, Severe acute respiratory syndrome coronavirus 2
agggtggttgtctcggatttt

SEQ ID NO: 3280 - DNA, 21 bp, Severe acute respiratory syndrome coronavirus 2
gggtggttgtctcggattttt

SEQ ID NO: 3281 - DNA, 21 bp, Severe acute respiratory syndrome coronavirus 2
ggtggttgtctcggatttttc

SEQ ID NO: 3282 - DNA, 21 bp, Severe acute respiratory syndrome coronavirus 2
gtggttgtctcggatttttcc

SEQ ID NO: 3283 - DNA, 21 bp, Severe acute respiratory syndrome coronavirus 2
tggttgtctcggatttttcct

SEQ ID NO: 3284 - DNA, 21 bp, Severe acute respiratory syndrome coronavirus 2
ggttgtctcggatttttcctg

SEQ ID NO: 3285 - DNA, 21 bp, Severe acute respiratory syndrome coronavirus 2
gttgtctcggatttttcctgt

SEQ ID NO: 3286 - DNA, 21 bp, Severe acute respiratory syndrome coronavirus 2
ttgtctcggatttttcctgtt

SEQ ID NO: 3287 - DNA, 21 bp, Severe acute respiratory syndrome coronavirus 2
tgtctcggatttttcctgttt

SEQ ID NO: 3288 - DNA, 21 bp, Severe acute respiratory syndrome coronavirus 2
gtctcggatttttcctgtttt

SEQ ID NO: 3289 - DNA, 21 bp, Severe acute respiratory syndrome coronavirus 2
tctcggatttttcctgttttt

SEQ ID NO: 3290 - DNA, 21 bp, Severe acute respiratory syndrome coronavirus 2
ctcggatttttcctgtttttc

SEQ ID NO: 3291 - DNA, 21 bp, Severe acute respiratory syndrome coronavirus 2
tcggatttttcctgtttttct

SEQ ID NO: 3292 - DNA, 21 bp, Severe acute respiratory syndrome coronavirus 2
cggatttttcctgtttttctt

SEQ ID NO: 3293 - DNA, 21 bp, Severe acute respiratory syndrome coronavirus 2
ctggtgtgttccgtctacccg

SEQ ID NO: 3294 - DNA, 21 bp, Severe acute respiratory syndrome coronavirus 2
tggtgtgttccgtctacccga

SEQ ID NO: 3295 - DNA, 21 bp, Severe acute respiratory syndrome coronavirus 2
ggtgtgttccgtctacccgat

SEQ ID NO: 3296 - DNA, 21 bp, Severe acute respiratory syndrome coronavirus 2
gtgtgttccgtctacccgata

SEQ ID NO: 3297 - DNA, 21 bp, Severe acute respiratory syndrome coronavirus 2
tatcagatgagaacacgtctt

SEQ ID NO: 3298 - DNA, 21 bp, Severe acute respiratory syndrome coronavirus 2
atcagatgagaacacgtctta

SEQ ID NO: 3299 - DNA, 21 bp, Severe acute respiratory syndrome coronavirus 2
tcagatgagaacacgtcttac

SEQ ID NO: 3300 - DNA, 21 bp, Severe acute respiratory syndrome coronavirus 2
cagatgagaacacgtcttact

SEQ ID NO: 3301 - DNA, 21 bp, Severe acute respiratory syndrome coronavirus 2
agatgagaacacgtcttactt

SEQ ID NO: 3302 - DNA, 21 bp, Severe acute respiratory syndrome coronavirus 2
gatgagaacacgtcttactta

SEQ ID NO: 3303 - DNA, 21 bp, Severe acute respiratory syndrome coronavirus 2
atgagaacacgtcttacttaa

SEQ ID NO: 3304 - DNA, 21 bp, Severe acute respiratory syndrome coronavirus 2
tgagaacacgtcttacttaag

SEQ ID NO: 3305 - DNA, 21 bp, Severe acute respiratory syndrome coronavirus 2
gagaacacgtcttacttaaga

SEQ ID NO: 3306 - DNA, 21 bp, Severe acute respiratory syndrome coronavirus 2
agaacacgtcttacttaagag

SEQ ID NO: 3307 - DNA, 21 bp, Severe acute respiratory syndrome coronavirus 2
gaacacgtcttacttaagagc

SEQ ID NO: 3308 - DNA, 21 bp, Severe acute respiratory syndrome coronavirus 2
aacacgtcttacttaagagca

SEQ ID NO: 3309 - DNA, 21 bp, Severe acute respiratory syndrome coronavirus 2
acacgtcttacttaagagcat

SEQ ID NO: 3310 - DNA, 21 bp, Severe acute respiratory syndrome coronavirus 2
atcaattgaaattagagtgta

SEQ ID NO: 3311 - DNA, 21 bp, Severe acute respiratory syndrome coronavirus 2
tcaattgaaattagagtgtat

SEQ ID NO: 3312 - DNA, 21 bp, Severe acute respiratory syndrome coronavirus 2
caattgaaattagagtgtatc

SEQ ID NO: 3313 - DNA, 21 bp, Severe acute respiratory syndrome coronavirus 2
aattgaaattagagtgtatcg

SEQ ID NO: 3314 - DNA, 21 bp, Severe acute respiratory syndrome coronavirus 2
attgaaattagagtgtatcgt

SEQ ID NO: 3315 - DNA, 21 bp, Severe acute respiratory syndrome coronavirus 2
ttgaaattagagtgtatcgtt

SEQ ID NO: 3316 - DNA, 21 bp, Severe acute respiratory syndrome coronavirus 2
tgaaattagagtgtatcgtta

SEQ ID NO: 3317 - DNA, 21 bp, Severe acute respiratory syndrome coronavirus 2
gaaattagagtgtatcgttag

SEQ ID NO: 3318 - DNA, 21 bp, Severe acute respiratory syndrome coronavirus 2
aaattagagtgtatcgttaga

SEQ ID NO: 3319 - DNA, 21 bp, Severe acute respiratory syndrome coronavirus 2
aattagagtgtatcgttagaa

SEQ ID NO: 3320 - DNA, 21 bp, Severe acute respiratory syndrome coronavirus 2
attagagtgtatcgttagaaa

SEQ ID NO: 3321 - DNA, 21 bp, Severe acute respiratory syndrome coronavirus 2
ttagagtgtatcgttagaaat

SEQ ID NO: 3322 - DNA, 21 bp, Severe acute respiratory syndrome coronavirus 2
tagagtgtatcgttagaaatt

SEQ ID NO: 3323 - DNA, 21 bp, Severe acute respiratory syndrome coronavirus 2
agagtgtatcgttagaaatta

SEQ ID NO: 3324 - DNA, 21 bp, Severe acute respiratory syndrome coronavirus 2
gagtgtatcgttagaaattag

SEQ ID NO: 3325 - DNA, 21 bp, Severe acute respiratory syndrome coronavirus 2
agtgtatcgttagaaattagt

SEQ ID NO: 3326 - DNA, 21 bp, Severe acute respiratory syndrome coronavirus 2
acacattgtaatccctcctga

SEQ ID NO: 3327 - DNA, 21 bp, Severe acute respiratory syndrome coronavirus 2
cacattgtaatccctcctgaa

SEQ ID NO: 3328 - DNA, 21 bp, Severe acute respiratory syndrome coronavirus 2
acattgtaatccctcctgaac

SEQ ID NO: 3329 - DNA, 21 bp, Severe acute respiratory syndrome coronavirus 2
cattgtaatccctcctgaact

SEQ ID NO: 3330 - DNA, 21 bp, Severe acute respiratory syndrome coronavirus 2
attgtaatccctcctgaactt

SEQ ID NO: 3331 - DNA, 21 bp, Severe acute respiratory syndrome coronavirus 2
ttgtaatccctcctgaacttt

SEQ ID NO: 3332 - DNA, 21 bp, Severe acute respiratory syndrome coronavirus 2
tgtaatccctcctgaactttc

SEQ ID NO: 3333 - DNA, 21 bp, Severe acute respiratory syndrome coronavirus 2
gtaatccctcctgaactttct

SEQ ID NO: 3334 - DNA, 21 bp, Severe acute respiratory syndrome coronavirus 2
taatccctcctgaactttctc

SEQ ID NO: 3335 - DNA, 21 bp, Severe acute respiratory syndrome coronavirus 2
aatccctcctgaactttctcg

SEQ ID NO: 3336 - DNA, 21 bp, Severe acute respiratory syndrome coronavirus 2
atccctcctgaactttctcgg

SEQ ID NO: 3337 - DNA, 21 bp, Severe acute respiratory syndrome coronavirus 2
tccctcctgaactttctcggt

SEQ ID NO: 3338 - DNA, 21 bp, Severe acute respiratory syndrome coronavirus 2
ccctcctgaactttctcggtg

SEQ ID NO: 3339 - DNA, 21 bp, Severe acute respiratory syndrome coronavirus 2
cctcctgaactttctcggtgg

SEQ ID NO: 3340 - DNA, 21 bp, Severe acute respiratory syndrome coronavirus 2
ctcctgaactttctcggtggt

SEQ ID NO: 3341 - DNA, 21 bp, Severe acute respiratory syndrome coronavirus 2
tcctgaactttctcggtggtg

SEQ ID NO: 3342 - DNA, 21 bp, Severe acute respiratory syndrome coronavirus 2
cctgaactttctcggtggtgt

SEQ ID NO: 3343 - DNA, 21 bp, Severe acute respiratory syndrome coronavirus 2
ctgaactttctcggtggtgta

SEQ ID NO: 3344 - DNA, 21 bp, Severe acute respiratory syndrome coronavirus 2
tgaactttctcggtggtgtaa

SEQ ID NO: 3345 - DNA, 21 bp, Severe acute respiratory syndrome coronavirus 2
gaactttctcggtggtgtaaa

SEQ ID NO: 3346 - DNA, 21 bp, Severe acute respiratory syndrome coronavirus 2
aactttctcggtggtgtaaaa

SEQ ID NO: 3347 - DNA, 21 bp, Severe acute respiratory syndrome coronavirus 2
actttctcggtggtgtaaaag

SEQ ID NO: 3348 - DNA, 21 bp, Severe acute respiratory syndrome coronavirus 2
ctttctcggtggtgtaaaagt

SEQ ID NO: 3349 - DNA, 21 bp, Severe acute respiratory syndrome coronavirus 2
gctccggtgcgcctcatgcta

SEQ ID NO: 3350 - DNA, 21 bp, Severe acute respiratory syndrome coronavirus 2
ctccggtgcgcctcatgctag

SEQ ID NO: 3351 - DNA, 21 bp, Severe acute respiratory syndrome coronavirus 2
tccggtgcgcctcatgctagc

SEQ ID NO: 3352 - DNA, 21 bp, Severe acute respiratory syndrome coronavirus 2
ccggtgcgcctcatgctagct

SEQ ID NO: 3353 - DNA, 21 bp, Severe acute respiratory syndrome coronavirus 2
cggtgcgcctcatgctagctc

SEQ ID NO: 3354 - DNA, 21 bp, Severe acute respiratory syndrome coronavirus 2
ttacgatccctctcgacggat

SEQ ID NO: 3355 - DNA, 21 bp, Severe acute respiratory syndrome coronavirus 2
tacgatccctctcgacggata

SEQ ID NO: 3356 - DNA, 21 bp, Severe acute respiratory syndrome coronavirus 2
acgatccctctcgacggatat

SEQ ID NO: 3357 - DNA, 21 bp, Severe acute respiratory syndrome coronavirus 2
cgatccctctcgacggatata

SEQ ID NO: 3358 - DNA, 21 bp, Severe acute respiratory syndrome coronavirus 2
gatccctctcgacggatatac

SEQ ID NO: 3359 - DNA, 21 bp, Severe acute respiratory syndrome coronavirus 2
atccctctcgacggatatacc

SEQ ID NO: 3360 - DNA, 21 bp, Severe acute respiratory syndrome coronavirus 2
tccctctcgacggatatacct

SEQ ID NO: 3361 - DNA, 21 bp, Severe acute respiratory syndrome coronavirus 2
ccctctcgacggatatacctt

SEQ ID NO: 3362 - DNA, 21 bp, Severe acute respiratory syndrome coronavirus 2
cctctcgacggatataccttc

SEQ ID NO: 3363 - DNA, 21 bp, Severe acute respiratory syndrome coronavirus 2
ctctcgacggatataccttct

SEQ ID NO: 3364 - DNA, 21 bp, Severe acute respiratory syndrome coronavirus 2
tctcgacggatataccttctc

SEQ ID NO: 3365 - DNA, 21 bp, Severe acute respiratory syndrome coronavirus 2
ctcgacggatataccttctcg

SEQ ID NO: 3366 - DNA, 21 bp, Severe acute respiratory syndrome coronavirus 2
tcgacggatataccttctcgg

SEQ ID NO: 3367 - DNA, 21 bp, Severe acute respiratory syndrome coronavirus 2
cgacggatataccttctcggg

SEQ ID NO: 3368 - DNA, 21 bp, Severe acute respiratory syndrome coronavirus 2
gacggatataccttctcggga

SEQ ID NO: 3369 - DNA, 21 bp, Severe acute respiratory syndrome coronavirus 2
acggatataccttctcgggat

SEQ ID NO: 3370 - DNA, 21 bp, Severe acute respiratory syndrome coronavirus 2
cggatataccttctcgggatt

SEQ ID NO: 3371 - DNA, 21 bp, Severe acute respiratory syndrome coronavirus 2
ggatataccttctcgggatta

SEQ ID NO: 3372 - DNA, 21 bp, Severe acute respiratory syndrome coronavirus 2
gatataccttctcgggattac

SEQ ID NO: 3373 - DNA, 21 bp, Severe acute respiratory syndrome coronavirus 2
atataccttctcgggattaca

SEQ ID NO: 3374 - DNA, 21 bp, Severe acute respiratory syndrome coronavirus 2
tataccttctcgggattacac

SEQ ID NO: 3375 - DNA, 21 bp, Severe acute respiratory syndrome coronavirus 2
ataccttctcgggattacaca

SEQ ID NO: 3376 - DNA, 21 bp, Severe acute respiratory syndrome coronavirus 2
taccttctcgggattacacat

SEQ ID NO: 3377 - DNA, 21 bp, Severe acute respiratory syndrome coronavirus 2
accttctcgggattacacatt

SEQ ID NO: 3378 - DNA, 21 bp, Severe acute respiratory syndrome coronavirus 2
ccttctcgggattacacattt

SEQ ID NO: 3379 - DNA, 21 bp, Severe acute respiratory syndrome coronavirus 2
cttctcgggattacacatttt

SEQ ID NO: 3380 - DNA, 21 bp, Severe acute respiratory syndrome coronavirus 2
ttctcgggattacacatttta

SEQ ID NO: 3381 - DNA, 21 bp, Severe acute respiratory syndrome coronavirus 2
tctcgggattacacattttaa

SEQ ID NO: 3382 - DNA, 21 bp, Severe acute respiratory syndrome coronavirus 2
ctcgggattacacattttaat

SEQ ID NO: 3383 - DNA, 21 bp, Severe acute respiratory syndrome coronavirus 2
tcgggattacacattttaatt

SEQ ID NO: 3384 - DNA, 21 bp, Severe acute respiratory syndrome coronavirus 2
cgggattacacattttaatta

SEQ ID NO: 3385 - DNA, 21 bp, Severe acute respiratory syndrome coronavirus 2
gggattacacattttaattaa

SEQ ID NO: 3386 - DNA, 21 bp, Severe acute respiratory syndrome coronavirus 2
ggattacacattttaattaaa

SEQ ID NO: 3387 - DNA, 21 bp, Severe acute respiratory syndrome coronavirus 2
gattacacattttaattaaaa

SEQ ID NO: 3388 - DNA, 21 bp, Severe acute respiratory syndrome coronavirus 2
attacacattttaattaaaat

SEQ ID NO: 3389 - DNA, 21 bp, Severe acute respiratory syndrome coronavirus 2
ttacacattttaattaaaatc

SEQ ID NO: 3390 - DNA, 21 bp, Severe acute respiratory syndrome coronavirus 2
tacacattttaattaaaatca

SEQ ID NO: 3391 - DNA, 21 bp, Severe acute respiratory syndrome coronavirus 2
acacattttaattaaaatcat

SEQ ID NO: 3392 - DNA, 21 bp, Severe acute respiratory syndrome coronavirus 2
cacattttaattaaaatcatc

SEQ ID NO: 3393 - DNA, 21 bp, Severe acute respiratory syndrome coronavirus 2
cacggacgaaaccgtaagcag

SEQ ID NO: 3394 - DNA, 21 bp, Severe acute respiratory syndrome coronavirus 2
acacggacgaaaccgtaagca

SEQ ID NO: 3395 - DNA, 21 bp, Severe acute respiratory syndrome coronavirus 2
aacacggacgaaaccgtaagc

SEQ ID NO: 3396 - DNA, 21 bp, Severe acute respiratory syndrome coronavirus 2
caacacggacgaaaccgtaag

SEQ ID NO: 3397 - DNA, 21 bp, Severe acute respiratory syndrome coronavirus 2
gcaacacggacgaaaccgtaa

SEQ ID NO: 3398 - DNA, 21 bp, Severe acute respiratory syndrome coronavirus 2
tgcaacacggacgaaaccgta

SEQ ID NO: 3399 - DNA, 21 bp, Severe acute respiratory syndrome coronavirus 2
ctgcaacacggacgaaaccgt

SEQ ID NO: 3400 - DNA, 21 bp, Severe acute respiratory syndrome coronavirus 2
tcacacccggacgaaacctag

SEQ ID NO: 3401 - DNA, 21 bp, Severe acute respiratory syndrome coronavirus 2
gtcacacccggacgaaaccta

SEQ ID NO: 3402 - DNA, 21 bp, Severe acute respiratory syndrome coronavirus 2
ggtcacacccggacgaaacct

SEQ ID NO: 3403 - DNA, 21 bp, Severe acute respiratory syndrome coronavirus 2
cggtcacacccggacgaaacc

SEQ ID NO: 3404 - DNA, 21 bp, Severe acute respiratory syndrome coronavirus 2
tcggtcacacccggacgaaac

SEQ ID NO: 3405 - DNA, 21 bp, Severe acute respiratory syndrome coronavirus 2
ttcggtcacacccggacgaaa

SEQ ID NO: 3406 - DNA, 21 bp, Severe acute respiratory syndrome coronavirus 2
tttcggtcacacccggacgaa

SEQ ID NO: 3407 - DNA, 21 bp, Severe acute respiratory syndrome coronavirus 2
ctttcggtcacacccggacga

SEQ ID NO: 3408 - DNA, 21 bp, Severe acute respiratory syndrome coronavirus 2
cctttcggtcacacccggacg

SEQ ID NO: 3409 - DNA, 21 bp, Severe acute respiratory syndrome coronavirus 2
acctttcggtcacacccggac

SEQ ID NO: 3410 - DNA, 21 bp, Severe acute respiratory syndrome coronavirus 2
tacctttcggtcacacccgga

SEQ ID NO: 3411 - DNA, 21 bp, Severe acute respiratory syndrome coronavirus 2
ttacctttcggtcacacccgg

SEQ ID NO: 3412 - DNA, 21 bp, Severe acute respiratory syndrome coronavirus 2
cttacctttcggtcacacccg

SEQ ID NO: 3413 - DNA, 21 bp, Severe acute respiratory syndrome coronavirus 2
tcttacctttcggtcacaccc

SEQ ID NO: 3414 - DNA, 21 bp, Severe acute respiratory syndrome coronavirus 2
atcttacctttcggtcacacc

SEQ ID NO: 3415 - DNA, 21 bp, Severe acute respiratory syndrome coronavirus 2
catcttacctttcggtcacac

SEQ ID NO: 3416 - DNA, 21 bp, Severe acute respiratory syndrome coronavirus 2
ccatcttacctttcggtcaca

SEQ ID NO: 3417 - DNA, 21 bp, Severe acute respiratory syndrome coronavirus 2
tccatcttacctttcggtcac

SEQ ID NO: 3418 - DNA, 21 bp, Severe acute respiratory syndrome coronavirus 2
ctccatcttacctttcggtca

SEQ ID NO: 3419 - DNA, 21 bp, Severe acute respiratory syndrome coronavirus 2
tctccatcttacctttcggtc

SEQ ID NO: 3420 - DNA, 21 bp, Severe acute respiratory syndrome coronavirus 2
ctctccatcttacctttcggt

SEQ ID NO: 3421 - DNA, 21 bp, Severe acute respiratory syndrome coronavirus 2
gctctccatcttacctttcgg

SEQ ID NO: 3422 - DNA, 21 bp, Severe acute respiratory syndrome coronavirus 2
ggctctccatcttacctttcg

SEQ ID NO: 3423 - DNA, 21 bp, Severe acute respiratory syndrome coronavirus 2
aggctctccatcttacctttc

SEQ ID NO: 3424 - DNA, 21 bp, Severe acute respiratory syndrome coronavirus 2
aaggctctccatcttaccttt

SEQ ID NO: 3425 - DNA, 21 bp, Severe acute respiratory syndrome coronavirus 2
caaggctctccatcttacctt

SEQ ID NO: 3426 - DNA, 21 bp, Severe acute respiratory syndrome coronavirus 2
acaaggctctccatcttacct

SEQ ID NO: 3427 - DNA, 21 bp, Severe acute respiratory syndrome coronavirus 2
ggacgtgtgttttctcgttga

SEQ ID NO: 3428 - DNA, 21 bp, Severe acute respiratory syndrome coronavirus 2
tggacgtgtgttttctcgttg

SEQ ID NO: 3429 - DNA, 21 bp, Severe acute respiratory syndrome coronavirus 2
ttggacgtgtgttttctcgtt

SEQ ID NO: 3430 - DNA, 21 bp, Severe acute respiratory syndrome coronavirus 2
gttggacgtgtgttttctcgt

SEQ ID NO: 3431 - DNA, 21 bp, Severe acute respiratory syndrome coronavirus 2
agttggacgtgtgttttctcg

SEQ ID NO: 3432 - DNA, 21 bp, Severe acute respiratory syndrome coronavirus 2
gagttggacgtgtgttttctc

SEQ ID NO: 3433 - DNA, 21 bp, Severe acute respiratory syndrome coronavirus 2
tgagttggacgtgtgttttct

SEQ ID NO: 3434 - DNA, 21 bp, Severe acute respiratory syndrome coronavirus 2
ctgagttggacgtgtgttttc

SEQ ID NO: 3435 - DNA, 21 bp, Severe acute respiratory syndrome coronavirus 2
actgagttggacgtgtgtttt

SEQ ID NO: 3436 - DNA, 21 bp, Severe acute respiratory syndrome coronavirus 2
aactgagttggacgtgtgttt

SEQ ID NO: 3437 - DNA, 21 bp, Severe acute respiratory syndrome coronavirus 2
aaactgagttggacgtgtgtt

SEQ ID NO: 3438 - DNA, 21 bp, Severe acute respiratory syndrome coronavirus 2
caaactgagttggacgtgtgt

SEQ ID NO: 3439 - DNA, 21 bp, Severe acute respiratory syndrome coronavirus 2
gcaaactgagttggacgtgtg

SEQ ID NO: 3440 - DNA, 21 bp, Severe acute respiratory syndrome coronavirus 2
ggcaaactgagttggacgtgt

SEQ ID NO: 3441 - DNA, 21 bp, Severe acute respiratory syndrome coronavirus 2
aggcaaactgagttggacgtg

SEQ ID NO: 3442 - DNA, 21 bp, Severe acute respiratory syndrome coronavirus 2
caggcaaactgagttggacgt

SEQ ID NO: 3443 - DNA, 21 bp, Severe acute respiratory syndrome coronavirus 2
acaggcaaactgagttggacg

SEQ ID NO: 3444 - DNA, 21 bp, Severe acute respiratory syndrome coronavirus 2
gaacacatagggctgttcaag

SEQ ID NO: 3445 - DNA, 21 bp, Severe acute respiratory syndrome coronavirus 2
tgaacacatagggctgttcaa

SEQ ID NO: 3446 - DNA, 21 bp, Severe acute respiratory syndrome coronavirus 2
atgaacacatagggctgttca

SEQ ID NO: 3447 - DNA, 21 bp, Severe acute respiratory syndrome coronavirus 2
accgttcttacgaagaagaac

SEQ ID NO: 3448 - DNA, 21 bp, Severe acute respiratory syndrome coronavirus 2
taccgttcttacgaagaagaa

SEQ ID NO: 3449 - DNA, 21 bp, Severe acute respiratory syndrome coronavirus 2
ttaccgttcttacgaagaaga

SEQ ID NO: 3450 - DNA, 21 bp, Severe acute respiratory syndrome coronavirus 2
attaccgttcttacgaagaag

SEQ ID NO: 3451 - DNA, 21 bp, Severe acute respiratory syndrome coronavirus 2
tattaccgttcttacgaagaa

SEQ ID NO: 3452 - DNA, 21 bp, Severe acute respiratory syndrome coronavirus 2
ttattaccgttcttacgaaga

SEQ ID NO: 3453 - DNA, 21 bp, Severe acute respiratory syndrome coronavirus 2
tcagtaagttttaaataacca

SEQ ID NO: 3454 - DNA, 21 bp, Severe acute respiratory syndrome coronavirus 2
gtcagtaagttttaaataacc

SEQ ID NO: 3455 - DNA, 21 bp, Severe acute respiratory syndrome coronavirus 2
tgtcagtaagttttaaataac

SEQ ID NO: 3456 - DNA, 21 bp, Severe acute respiratory syndrome coronavirus 2
ttgtcagtaagttttaaataa

SEQ ID NO: 3457 - DNA, 21 bp, Severe acute respiratory syndrome coronavirus 2
attgtcagtaagttttaaata

SEQ ID NO: 3458 - DNA, 21 bp, Severe acute respiratory syndrome coronavirus 2
cattgtcagtaagttttaaat

SEQ ID NO: 3459 - DNA, 21 bp, Severe acute respiratory syndrome coronavirus 2
acattgtcagtaagttttaaa

SEQ ID NO: 3460 - DNA, 21 bp, Severe acute respiratory syndrome coronavirus 2
ttttccactacttcttcagag

SEQ ID NO: 3461 - DNA, 21 bp, Severe acute respiratory syndrome coronavirus 2
attttccactacttcttcaga

SEQ ID NO: 3462 - DNA, 21 bp, Severe acute respiratory syndrome coronavirus 2
gattttccactacttcttcag

SEQ ID NO: 3463 - DNA, 21 bp, Severe acute respiratory syndrome coronavirus 2
ggattttccactacttcttca

SEQ ID NO: 3464 - DNA, 21 bp, Severe acute respiratory syndrome coronavirus 2
aggattttccactacttcttc

SEQ ID NO: 3465 - DNA, 21 bp, Severe acute respiratory syndrome coronavirus 2
taggattttccactacttctt

SEQ ID NO: 3466 - DNA, 21 bp, Severe acute respiratory syndrome coronavirus 2
gtaggattttccactacttct

SEQ ID NO: 3467 - DNA, 21 bp, Severe acute respiratory syndrome coronavirus 2
ggtaggattttccactacttc

SEQ ID NO: 3468 - DNA, 21 bp, Severe acute respiratory syndrome coronavirus 2
tacaacttcggtagttttcac

SEQ ID NO: 3469 - DNA, 21 bp, Severe acute respiratory syndrome coronavirus 2
ctacaacttcggtagttttca

SEQ ID NO: 3470 - DNA, 21 bp, Severe acute respiratory syndrome coronavirus 2
cctacaacttcggtagttttc

SEQ ID NO: 3471 - DNA, 21 bp, Severe acute respiratory syndrome coronavirus 2
aaaaccaacactaccacatga

SEQ ID NO: 3472 - DNA, 21 bp, Severe acute respiratory syndrome coronavirus 2
taaaaccaacactaccacatg

SEQ ID NO: 3473 - DNA, 21 bp, Severe acute respiratory syndrome coronavirus 2
ttaaaaccaacactaccacat

SEQ ID NO: 3474 - DNA, 21 bp, Severe acute respiratory syndrome coronavirus 2
gttaaaaccaacactaccaca

SEQ ID NO: 3475 - DNA, 21 bp, Severe acute respiratory syndrome coronavirus 2
tgttaaaaccaacactaccac

SEQ ID NO: 3476 - DNA, 21 bp, Severe acute respiratory syndrome coronavirus 2
atgttaaaaccaacactacca

SEQ ID NO: 3477 - DNA, 21 bp, Severe acute respiratory syndrome coronavirus 2
atagcctaagaaacaataaac

SEQ ID NO: 3478 - DNA, 21 bp, Severe acute respiratory syndrome coronavirus 2
aatagcctaagaaacaataaa

SEQ ID NO: 3479 - DNA, 21 bp, Severe acute respiratory syndrome coronavirus 2
gtctacagcaccctgcatgga

SEQ ID NO: 3480 - DNA, 21 bp, Severe acute respiratory syndrome coronavirus 2
tgtctacagcaccctgcatgg

SEQ ID NO: 3481 - DNA, 21 bp, Severe acute respiratory syndrome coronavirus 2
atgtctacagcaccctgcatg

SEQ ID NO: 3482 - DNA, 21 bp, Severe acute respiratory syndrome coronavirus 2
agatttagccacattcaaaga

SEQ ID NO: 3483 - DNA, 21 bp, Severe acute respiratory syndrome coronavirus 2
cagatttagccacattcaaag

SEQ ID NO: 3484 - DNA, 21 bp, Severe acute respiratory syndrome coronavirus 2
tcagatttagccacattcaaa

SEQ ID NO: 3485 - DNA, 21 bp, Severe acute respiratory syndrome coronavirus 2
cttagggaatctagcccattt

SEQ ID NO: 3486 - DNA, 21 bp, Severe acute respiratory syndrome coronavirus 2
tcttagggaatctagcccatt

SEQ ID NO: 3487 - DNA, 21 bp, Severe acute respiratory syndrome coronavirus 2
ctcttagggaatctagcccat

SEQ ID NO: 3488 - DNA, 21 bp, Severe acute respiratory syndrome coronavirus 2
actcttagggaatctagccca

SEQ ID NO: 3489 - DNA, 21 bp, Severe acute respiratory syndrome coronavirus 2
cactcttagggaatctagccc

SEQ ID NO: 3490 - DNA, 21 bp, Severe acute respiratory syndrome coronavirus 2
tcactcttagggaatctagcc

SEQ ID NO: 3491 - DNA, 21 bp, Severe acute respiratory syndrome coronavirus 2
atcactcttagggaatctagc

SEQ ID NO: 3492 - DNA, 21 bp, Severe acute respiratory syndrome coronavirus 2
catcactcttagggaatctag

SEQ ID NO: 3493 - DNA, 21 bp, Severe acute respiratory syndrome coronavirus 2
ccatcactcttagggaatcta

SEQ ID NO: 3494 - DNA, 21 bp, Severe acute respiratory syndrome coronavirus 2
tacaaggtggttccagttctg

SEQ ID NO: 3495 - DNA, 21 bp, Severe acute respiratory syndrome coronavirus 2
ctacaaggtggttccagttct

SEQ ID NO: 3496 - DNA, 21 bp, Severe acute respiratory syndrome coronavirus 2
cctacaaggtggttccagttc

SEQ ID NO: 3497 - DNA, 21 bp, Severe acute respiratory syndrome coronavirus 2
acctacaaggtggttccagtt

SEQ ID NO: 3498 - DNA, 21 bp, Severe acute respiratory syndrome coronavirus 2
aacctacaaggtggttccagt

SEQ ID NO: 3499 - DNA, 21 bp, Severe acute respiratory syndrome coronavirus 2
aaacctacaaggtggttccag

SEQ ID NO: 3500 - DNA, 21 bp, Severe acute respiratory syndrome coronavirus 2
caaacctacaaggtggttcca

SEQ ID NO: 3501 - DNA, 21 bp, Severe acute respiratory syndrome coronavirus 2
acaaacctacaaggtggttcc

SEQ ID NO: 3502 - DNA, 21 bp, Severe acute respiratory syndrome coronavirus 2
aacaaacctacaaggtggttc

SEQ ID NO: 3503 - DNA, 21 bp, Severe acute respiratory syndrome coronavirus 2
taacaaacctacaaggtggtt

SEQ ID NO: 3504 - DNA, 21 bp, Severe acute respiratory syndrome coronavirus 2
gtaacaaacctacaaggtggt

SEQ ID NO: 3505 - DNA, 21 bp, Severe acute respiratory syndrome coronavirus 2
tgtaacaaacctacaaggtgg

SEQ ID NO: 3506 - DNA, 21 bp, Severe acute respiratory syndrome coronavirus 2
ctgtaacaaacctacaaggtg

SEQ ID NO: 3507 - DNA, 21 bp, Severe acute respiratory syndrome coronavirus 2
tctgtaacaaacctacaaggt

SEQ ID NO: 3508 - DNA, 21 bp, Severe acute respiratory syndrome coronavirus 2
gtctgtaacaaacctacaagg

SEQ ID NO: 3509 - DNA, 21 bp, Severe acute respiratory syndrome coronavirus 2
tgtctgtaacaaacctacaag

SEQ ID NO: 3510 - DNA, 21 bp, Severe acute respiratory syndrome coronavirus 2
gtgtctgtaacaaacctacaa

SEQ ID NO: 3511 - DNA, 21 bp, Severe acute respiratory syndrome coronavirus 2
tgtgtctgtaacaaacctaca

SEQ ID NO: 3512 - DNA, 21 bp, Severe acute respiratory syndrome coronavirus 2
gtgtgtctgtaacaaacctac

SEQ ID NO: 3513 - DNA, 21 bp, Severe acute respiratory syndrome coronavirus 2
ggtgtgtctgtaacaaaccta

SEQ ID NO: 3514 - DNA, 21 bp, Severe acute respiratory syndrome coronavirus 2
tacctctatttaggttgttta

SEQ ID NO: 3515 - DNA, 21 bp, Severe acute respiratory syndrome coronavirus 2
atacctctatttaggttgttt

SEQ ID NO: 3516 - DNA, 21 bp, Severe acute respiratory syndrome coronavirus 2
catacctctatttaggttgtt

SEQ ID NO: 3517 - DNA, 21 bp, Severe acute respiratory syndrome coronavirus 2
ccatacctctatttaggttgt

SEQ ID NO: 3518 - DNA, 21 bp, Severe acute respiratory syndrome coronavirus 2
accatacctctatttaggttg

SEQ ID NO: 3519 - DNA, 21 bp, Severe acute respiratory syndrome coronavirus 2
agtgtgtgtacacaacatctt

SEQ ID NO: 3520 - DNA, 21 bp, Severe acute respiratory syndrome coronavirus 2
cagtgtgtgtacacaacatct

SEQ ID NO: 3521 - DNA, 21 bp, Severe acute respiratory syndrome coronavirus 2
ccagtgtgtgtacacaacatc

SEQ ID NO: 3522 - DNA, 21 bp, Severe acute respiratory syndrome coronavirus 2
accagtgtgtgtacacaacat

SEQ ID NO: 3523 - DNA, 21 bp, Severe acute respiratory syndrome coronavirus 2
taccagtgtgtgtacacaaca

SEQ ID NO: 3524 - DNA, 21 bp, Severe acute respiratory syndrome coronavirus 2
gtaccagtgtgtgtacacaac

SEQ ID NO: 3525 - DNA, 21 bp, Severe acute respiratory syndrome coronavirus 2
cagacggtacagactgtgttt

SEQ ID NO: 3526 - DNA, 21 bp, Severe acute respiratory syndrome coronavirus 2
gcagacggtacagactgtgtt

SEQ ID NO: 3527 - DNA, 21 bp, Severe acute respiratory syndrome coronavirus 2
cgcagacggtacagactgtgt

SEQ ID NO: 3528 - DNA, 21 bp, Severe acute respiratory syndrome coronavirus 2
ccgcagacggtacagactgtg

SEQ ID NO: 3529 - DNA, 21 bp, Severe acute respiratory syndrome coronavirus 2
acagccataacctttccacat

SEQ ID NO: 3530 - DNA, 21 bp, Severe acute respiratory syndrome coronavirus 2
tacagccataacctttccaca

SEQ ID NO: 3531 - DNA, 21 bp, Severe acute respiratory syndrome coronavirus 2
ctacagccataacctttccac

SEQ ID NO: 3532 - DNA, 21 bp, Severe acute respiratory syndrome coronavirus 2
actacagccataacctttcca

SEQ ID NO: 3533 - DNA, 21 bp, Severe acute respiratory syndrome coronavirus 2
aactacagccataacctttcc

SEQ ID NO: 3534 - DNA, 21 bp, Severe acute respiratory syndrome coronavirus 2
caactacagccataacctttc

SEQ ID NO: 3535 - DNA, 21 bp, Severe acute respiratory syndrome coronavirus 2
acaactacagccataaccttt

SEQ ID NO: 3536 - DNA, 21 bp, Severe acute respiratory syndrome coronavirus 2
cacaactacagccataacctt

SEQ ID NO: 3537 - DNA, 21 bp, Severe acute respiratory syndrome coronavirus 2
tcacaactacagccataacct

SEQ ID NO: 3538 - DNA, 21 bp, Severe acute respiratory syndrome coronavirus 2
ccgcaaacccgtttaaaaacg

SEQ ID NO: 3539 - DNA, 21 bp, Severe acute respiratory syndrome coronavirus 2
accgcaaacccgtttaaaaac

SEQ ID NO: 3540 - DNA, 21 bp, Severe acute respiratory syndrome coronavirus 2
caccgcaaacccgtttaaaaa

SEQ ID NO: 3541 - DNA, 21 bp, Severe acute respiratory syndrome coronavirus 2
acaccgcaaacccgtttaaaa

SEQ ID NO: 3542 - DNA, 21 bp, Severe acute respiratory syndrome coronavirus 2
tacaccgcaaacccgtttaaa

SEQ ID NO: 3543 - DNA, 21 bp, Severe acute respiratory syndrome coronavirus 2
ttacaccgcaaacccgtttaa

SEQ ID NO: 3544 - DNA, 21 bp, Severe acute respiratory syndrome coronavirus 2
cttacaccgcaaacccgttta

SEQ ID NO: 3545 - DNA, 21 bp, Severe acute respiratory syndrome coronavirus 2
acttacaccgcaaacccgttt

SEQ ID NO: 3546 - DNA, 21 bp, Severe acute respiratory syndrome coronavirus 2
cacttacaccgcaaacccgtt

SEQ ID NO: 3547 - DNA, 21 bp, Severe acute respiratory syndrome coronavirus 2
gcacttacaccgcaaacccgt

SEQ ID NO: 3548 - DNA, 21 bp, Severe acute respiratory syndrome coronavirus 2
tgcacttacaccgcaaacccg

SEQ ID NO: 3549 - DNA, 21 bp, Severe acute respiratory syndrome coronavirus 2
ctgcacttacaccgcaaaccc

SEQ ID NO: 3550 - DNA, 21 bp, Severe acute respiratory syndrome coronavirus 2
gctgcacttacaccgcaaacc

SEQ ID NO: 3551 - DNA, 21 bp, Severe acute respiratory syndrome coronavirus 2
ggctgcacttacaccgcaaac

SEQ ID NO: 3552 - DNA, 21 bp, Severe acute respiratory syndrome coronavirus 2
gggctgcacttacaccgcaaa

SEQ ID NO: 3553 - DNA, 21 bp, Severe acute respiratory syndrome coronavirus 2
cgggctgcacttacaccgcaa

SEQ ID NO: 3554 - DNA, 21 bp, Severe acute respiratory syndrome coronavirus 2
acgggctgcacttacaccgca

SEQ ID NO: 3555 - DNA, 21 bp, Severe acute respiratory syndrome coronavirus 2
gacgggctgcacttacaccgc

SEQ ID NO: 3556 - DNA, 21 bp, Severe acute respiratory syndrome coronavirus 2
agacgggctgcacttacaccg

SEQ ID NO: 3557 - DNA, 21 bp, Severe acute respiratory syndrome coronavirus 2
aagacgggctgcacttacacc

SEQ ID NO: 3558 - DNA, 21 bp, Severe acute respiratory syndrome coronavirus 2
taagacgggctgcacttacac

SEQ ID NO: 3559 - DNA, 21 bp, Severe acute respiratory syndrome coronavirus 2
gtaagacgggctgcacttaca

SEQ ID NO: 3560 - DNA, 21 bp, Severe acute respiratory syndrome coronavirus 2
tgtaagacgggctgcacttac

SEQ ID NO: 3561 - DNA, 21 bp, Severe acute respiratory syndrome coronavirus 2
gtgtaagacgggctgcactta

SEQ ID NO: 3562 - DNA, 21 bp, Severe acute respiratory syndrome coronavirus 2
ggtgtaagacgggctgcactt

SEQ ID NO: 3563 - DNA, 21 bp, Severe acute respiratory syndrome coronavirus 2
cggtgtaagacgggctgcact

SEQ ID NO: 3564 - DNA, 21 bp, Severe acute respiratory syndrome coronavirus 2
acggtgtaagacgggctgcac

SEQ ID NO: 3565 - DNA, 21 bp, Severe acute respiratory syndrome coronavirus 2
cacggtgtaagacgggctgca

SEQ ID NO: 3566 - DNA, 21 bp, Severe acute respiratory syndrome coronavirus 2
gcacggtgtaagacgggctgc

SEQ ID NO: 3567 - DNA, 21 bp, Severe acute respiratory syndrome coronavirus 2
cgcacggtgtaagacgggctg

SEQ ID NO: 3568 - DNA, 21 bp, Severe acute respiratory syndrome coronavirus 2
ccgcacggtgtaagacgggct

SEQ ID NO: 3569 - DNA, 21 bp, Severe acute respiratory syndrome coronavirus 2
gccgcacggtgtaagacgggc

SEQ ID NO: 3570 - DNA, 21 bp, Severe acute respiratory syndrome coronavirus 2
tgccgcacggtgtaagacggg

SEQ ID NO: 3571 - DNA, 21 bp, Severe acute respiratory syndrome coronavirus 2
gtgccgcacggtgtaagacgg

SEQ ID NO: 3572 - DNA, 21 bp, Severe acute respiratory syndrome coronavirus 2
tgtgccgcacggtgtaagacg

SEQ ID NO: 3573 - DNA, 21 bp, Severe acute respiratory syndrome coronavirus 2
ctgtgccgcacggtgtaagac

SEQ ID NO: 3574 - DNA, 21 bp, Severe acute respiratory syndrome coronavirus 2
cctgtgccgcacggtgtaaga

SEQ ID NO: 3575 - DNA, 21 bp, Severe acute respiratory syndrome coronavirus 2
gcctgtgccgcacggtgtaag

SEQ ID NO: 3576 - DNA, 21 bp, Severe acute respiratory syndrome coronavirus 2
tgcctgtgccgcacggtgtaa

SEQ ID NO: 3577 - DNA, 21 bp, Severe acute respiratory syndrome coronavirus 2
gtgcctgtgccgcacggtgta

SEQ ID NO: 3578 - DNA, 21 bp, Severe acute respiratory syndrome coronavirus 2
agtgcctgtgccgcacggtgt

SEQ ID NO: 3579 - DNA, 21 bp, Severe acute respiratory syndrome coronavirus 2
tagtgcctgtgccgcacggtg

SEQ ID NO: 3580 - DNA, 21 bp, Severe acute respiratory syndrome coronavirus 2
ctagtgcctgtgccgcacggt

SEQ ID NO: 3581 - DNA, 21 bp, Severe acute respiratory syndrome coronavirus 2
tatatgtggtaccatgtcacc

SEQ ID NO: 3582 - DNA, 21 bp, Severe acute respiratory syndrome coronavirus 2
atatatgtggtaccatgtcac

SEQ ID NO: 3583 - DNA, 21 bp, Severe acute respiratory syndrome coronavirus 2
gatatatgtggtaccatgtca

SEQ ID NO: 3584 - DNA, 21 bp, Severe acute respiratory syndrome coronavirus 2
tgatatatgtggtaccatgtc

SEQ ID NO: 3585 - DNA, 21 bp, Severe acute respiratory syndrome coronavirus 2
gtgatatatgtggtaccatgt

SEQ ID NO: 3586 - DNA, 21 bp, Severe acute respiratory syndrome coronavirus 2
cgtgatatatgtggtaccatg

SEQ ID NO: 3587 - DNA, 21 bp, Severe acute respiratory syndrome coronavirus 2
acgtgatatatgtggtaccat

SEQ ID NO: 3588 - DNA, 21 bp, Severe acute respiratory syndrome coronavirus 2
gacgtgatatatgtggtacca

SEQ ID NO: 3589 - DNA, 21 bp, Severe acute respiratory syndrome coronavirus 2
tgacgtgatatatgtggtacc

SEQ ID NO: 3590 - DNA, 21 bp, Severe acute respiratory syndrome coronavirus 2
ccaatatttaaaataacggtc

SEQ ID NO: 3591 - DNA, 21 bp, Severe acute respiratory syndrome coronavirus 2
cccaatatttaaaataacggt

SEQ ID NO: 3592 - DNA, 21 bp, Severe acute respiratory syndrome coronavirus 2
tcccaatatttaaaataacgg

SEQ ID NO: 3593 - DNA, 21 bp, Severe acute respiratory syndrome coronavirus 2
tggtccaaaacttgtaggtgg

SEQ ID NO: 3594 - DNA, 21 bp, Severe acute respiratory syndrome coronavirus 2
gtggtccaaaacttgtaggtg

SEQ ID NO: 3595 - DNA, 21 bp, Severe acute respiratory syndrome coronavirus 2
agtggtccaaaacttgtaggt

SEQ ID NO: 3596 - DNA, 21 bp, Severe acute respiratory syndrome coronavirus 2
tagtggtccaaaacttgtagg

SEQ ID NO: 3597 - DNA, 21 bp, Severe acute respiratory syndrome coronavirus 2
ctagtggtccaaaacttgtag

SEQ ID NO: 3598 - DNA, 21 bp, Severe acute respiratory syndrome coronavirus 2
actagtggtccaaaacttgta

SEQ ID NO: 3599 - DNA, 21 bp, Severe acute respiratory syndrome coronavirus 2
gtttacatcctgattatgtac

SEQ ID NO: 3600 - DNA, 21 bp, Severe acute respiratory syndrome coronavirus 2
agtttacatcctgattatgta

SEQ ID NO: 3601 - DNA, 21 bp, Severe acute respiratory syndrome coronavirus 2
aagtttacatcctgattatgt

SEQ ID NO: 3602 - DNA, 21 bp, Severe acute respiratory syndrome coronavirus 2
taagtttacatcctgattatg

SEQ ID NO: 3603 - DNA, 21 bp, Severe acute respiratory syndrome coronavirus 2
gtaagtttacatcctgattat

SEQ ID NO: 3604 - DNA, 21 bp, Severe acute respiratory syndrome coronavirus 2
tgtaagtttacatcctgatta

SEQ ID NO: 3605 - DNA, 21 bp, Severe acute respiratory syndrome coronavirus 2
atgtaagtttacatcctgatt

SEQ ID NO: 3606 - DNA, 21 bp, Severe acute respiratory syndrome coronavirus 2
tatgtaagtttacatcctgat

SEQ ID NO: 3607 - DNA, 21 bp, Severe acute respiratory syndrome coronavirus 2
ctatgtaagtttacatcctga

SEQ ID NO: 3608 - DNA, 21 bp, Severe acute respiratory syndrome coronavirus 2
gctatgtaagtttacatcctg

SEQ ID NO: 3609 - DNA, 21 bp, Severe acute respiratory syndrome coronavirus 2
agctatgtaagtttacatcct

SEQ ID NO: 3610 - DNA, 21 bp, Severe acute respiratory syndrome coronavirus 2
gagctatgtaagtttacatcc

SEQ ID NO: 3611 - DNA, 21 bp, Severe acute respiratory syndrome coronavirus 2
gacagtttgaaaagcaacatt

SEQ ID NO: 3612 - DNA, 21 bp, Severe acute respiratory syndrome coronavirus 2
tgacagtttgaaaagcaacat

SEQ ID NO: 3613 - DNA, 21 bp, Severe acute respiratory syndrome coronavirus 2
ttgacagtttgaaaagcaaca

SEQ ID NO: 3614 - DNA, 21 bp, Severe acute respiratory syndrome coronavirus 2
tttgacagtttgaaaagcaac

SEQ ID NO: 3615 - DNA, 21 bp, Severe acute respiratory syndrome coronavirus 2
gtttgacagtttgaaaagcaa

SEQ ID NO: 3616 - DNA, 21 bp, Severe acute respiratory syndrome coronavirus 2
ggtttgacagtttgaaaagca

SEQ ID NO: 3617 - DNA, 21 bp, Severe acute respiratory syndrome coronavirus 2
gggtttgacagtttgaaaagc

SEQ ID NO: 3618 - DNA, 21 bp, Severe acute respiratory syndrome coronavirus 2
cgggtttgacagtttgaaaag

SEQ ID NO: 3619 - DNA, 21 bp, Severe acute respiratory syndrome coronavirus 2
ccgggtttgacagtttgaaaa

SEQ ID NO: 3620 - DNA, 21 bp, Severe acute respiratory syndrome coronavirus 2
accgggtttgacagtttgaaa

SEQ ID NO: 3621 - DNA, 21 bp, Severe acute respiratory syndrome coronavirus 2
taccgggtttgacagtttgaa

SEQ ID NO: 3622 - DNA, 21 bp, Severe acute respiratory syndrome coronavirus 2
ttaccgggtttgacagtttga

SEQ ID NO: 3623 - DNA, 21 bp, Severe acute respiratory syndrome coronavirus 2
attaccgggtttgacagtttg

SEQ ID NO: 3624 - DNA, 21 bp, Severe acute respiratory syndrome coronavirus 2
aattaccgggtttgacagttt

SEQ ID NO: 3625 - DNA, 21 bp, Severe acute respiratory syndrome coronavirus 2
aaattaccgggtttgacagtt

SEQ ID NO: 3626 - DNA, 21 bp, Severe acute respiratory syndrome coronavirus 2
aaaattaccgggtttgacagt

SEQ ID NO: 3627 - DNA, 21 bp, Severe acute respiratory syndrome coronavirus 2
taaaattaccgggtttgacag

SEQ ID NO: 3628 - DNA, 21 bp, Severe acute respiratory syndrome coronavirus 2
ttaaaattaccgggtttgaca

SEQ ID NO: 3629 - DNA, 21 bp, Severe acute respiratory syndrome coronavirus 2
agaacttccttccttaaagaa

SEQ ID NO: 3630 - DNA, 21 bp, Severe acute respiratory syndrome coronavirus 2
cagaacttccttccttaaaga

SEQ ID NO: 3631 - DNA, 21 bp, Severe acute respiratory syndrome coronavirus 2
acagaacttccttccttaaag

SEQ ID NO: 3632 - DNA, 21 bp, Severe acute respiratory syndrome coronavirus 2
aacagaacttccttccttaaa

SEQ ID NO: 3633 - DNA, 21 bp, Severe acute respiratory syndrome coronavirus 2
caacagaacttccttccttaa

SEQ ID NO: 3634 - DNA, 21 bp, Severe acute respiratory syndrome coronavirus 2
tcaacagaacttccttcctta

SEQ ID NO: 3635 - DNA, 21 bp, Severe acute respiratory syndrome coronavirus 2
ttcaacagaacttccttcctt

SEQ ID NO: 3636 - DNA, 21 bp, Severe acute respiratory syndrome coronavirus 2
gagcaaagaagaagtgtttta

SEQ ID NO: 3637 - DNA, 21 bp, Severe acute respiratory syndrome coronavirus 2
tgagcaaagaagaagtgtttt

SEQ ID NO: 3638 - DNA, 21 bp, Severe acute respiratory syndrome coronavirus 2
ctgagcaaagaagaagtgttt

SEQ ID NO: 3639 - DNA, 21 bp, Severe acute respiratory syndrome coronavirus 2
cctgagcaaagaagaagtgtt

SEQ ID NO: 3640 - DNA, 21 bp, Severe acute respiratory syndrome coronavirus 2
tcctgagcaaagaagaagtgt

SEQ ID NO: 3641 - DNA, 21 bp, Severe acute respiratory syndrome coronavirus 2
atcctgagcaaagaagaagtg

SEQ ID NO: 3642 - DNA, 21 bp, Severe acute respiratory syndrome coronavirus 2
catcctgagcaaagaagaagt

SEQ ID NO: 3643 - DNA, 21 bp, Severe acute respiratory syndrome coronavirus 2
ccatcctgagcaaagaagaag

SEQ ID NO: 3644 - DNA, 21 bp, Severe acute respiratory syndrome coronavirus 2
tctgatatcacacattgttgg

SEQ ID NO: 3645 - DNA, 21 bp, Severe acute respiratory syndrome coronavirus 2
gtctgatatcacacattgttg

SEQ ID NO: 3646 - DNA, 21 bp, Severe acute respiratory syndrome coronavirus 2
tgtctgatatcacacattgtt

SEQ ID NO: 3647 - DNA, 21 bp, Severe acute respiratory syndrome coronavirus 2
ttgtctgatatcacacattgt

SEQ ID NO: 3648 - DNA, 21 bp, Severe acute respiratory syndrome coronavirus 2
gttgtctgatatcacacattg

SEQ ID NO: 3649 - DNA, 21 bp, Severe acute respiratory syndrome coronavirus 2
agttgtctgatatcacacatt

SEQ ID NO: 3650 - DNA, 21 bp, Severe acute respiratory syndrome coronavirus 2
accatcgtaacaatcaaagta

SEQ ID NO: 3651 - DNA, 21 bp, Severe acute respiratory syndrome coronavirus 2
caccatcgtaacaatcaaagt

SEQ ID NO: 3652 - DNA, 21 bp, Severe acute respiratory syndrome coronavirus 2
ccaccatcgtaacaatcaaag

SEQ ID NO: 3653 - DNA, 21 bp, Severe acute respiratory syndrome coronavirus 2
gccaccatcgtaacaatcaaa

SEQ ID NO: 3654 - DNA, 21 bp, Severe acute respiratory syndrome coronavirus 2
agccaccatcgtaacaatcaa

SEQ ID NO: 3655 - DNA, 21 bp, Severe acute respiratory syndrome coronavirus 2
cagccaccatcgtaacaatca

SEQ ID NO: 3656 - DNA, 21 bp, Severe acute respiratory syndrome coronavirus 2
acagccaccatcgtaacaatc

SEQ ID NO: 3657 - DNA, 21 bp, Severe acute respiratory syndrome coronavirus 2
tacagccaccatcgtaacaat

SEQ ID NO: 3658 - DNA, 21 bp, Severe acute respiratory syndrome coronavirus 2
atacagccaccatcgtaacaa

SEQ ID NO: 3659 - DNA, 21 bp, Severe acute respiratory syndrome coronavirus 2
aagtctagccttaccccattt

SEQ ID NO: 3660 - DNA, 21 bp, Severe acute respiratory syndrome coronavirus 2
aaagtctagccttaccccatt

SEQ ID NO: 3661 - DNA, 21 bp, Severe acute respiratory syndrome coronavirus 2
taaagtctagccttaccccat

SEQ ID NO: 3662 - DNA, 21 bp, Severe acute respiratory syndrome coronavirus 2
ataaagtctagccttacccca

SEQ ID NO: 3663 - DNA, 21 bp, Severe acute respiratory syndrome coronavirus 2
aataaagtctagccttacccc

SEQ ID NO: 3664 - DNA, 21 bp, Severe acute respiratory syndrome coronavirus 2
taataaagtctagccttaccc

SEQ ID NO: 3665 - DNA, 21 bp, Severe acute respiratory syndrome coronavirus 2
ataataaagtctagccttacc

SEQ ID NO: 3666 - DNA, 21 bp, Severe acute respiratory syndrome coronavirus 2
cataataaagtctagccttac

SEQ ID NO: 3667 - DNA, 21 bp, Severe acute respiratory syndrome coronavirus 2
tcataataaagtctagcctta

SEQ ID NO: 3668 - DNA, 21 bp, Severe acute respiratory syndrome coronavirus 2
ttgatcctcataactcattga

SEQ ID NO: 3669 - DNA, 21 bp, Severe acute respiratory syndrome coronavirus 2
cttgatcctcataactcattg

SEQ ID NO: 3670 - DNA, 21 bp, Severe acute respiratory syndrome coronavirus 2
tcttgatcctcataactcatt

SEQ ID NO: 3671 - DNA, 21 bp, Severe acute respiratory syndrome coronavirus 2
atcttgatcctcataactcat

SEQ ID NO: 3672 - DNA, 21 bp, Severe acute respiratory syndrome coronavirus 2
catcttgatcctcataactca

SEQ ID NO: 3673 - DNA, 21 bp, Severe acute respiratory syndrome coronavirus 2
gcatcttgatcctcataactc

SEQ ID NO: 3674 - DNA, 21 bp, Severe acute respiratory syndrome coronavirus 2
tgcatcttgatcctcataact

SEQ ID NO: 3675 - DNA, 21 bp, Severe acute respiratory syndrome coronavirus 2
gtgcatcttgatcctcataac

SEQ ID NO: 3676 - DNA, 21 bp, Severe acute respiratory syndrome coronavirus 2
agtgcatcttgatcctcataa

SEQ ID NO: 3677 - DNA, 21 bp, Severe acute respiratory syndrome coronavirus 2
cttaagattcatttgagttat

SEQ ID NO: 3678 - DNA, 21 bp, Severe acute respiratory syndrome coronavirus 2
acttaagattcatttgagtta

SEQ ID NO: 3679 - DNA, 21 bp, Severe acute respiratory syndrome coronavirus 2
tacttaagattcatttgagtt

SEQ ID NO: 3680 - DNA, 21 bp, Severe acute respiratory syndrome coronavirus 2
atacttaagattcatttgagt

SEQ ID NO: 3681 - DNA, 21 bp, Severe acute respiratory syndrome coronavirus 2
catacttaagattcatttgag

SEQ ID NO: 3682 - DNA, 21 bp, Severe acute respiratory syndrome coronavirus 2
gcatacttaagattcatttga

SEQ ID NO: 3683 - DNA, 21 bp, Severe acute respiratory syndrome coronavirus 2
ggcatacttaagattcatttg

SEQ ID NO: 3684 - DNA, 21 bp, Severe acute respiratory syndrome coronavirus 2
tggcatacttaagattcattt

SEQ ID NO: 3685 - DNA, 21 bp, Severe acute respiratory syndrome coronavirus 2
atggcatacttaagattcatt

SEQ ID NO: 3686 - DNA, 21 bp, Severe acute respiratory syndrome coronavirus 2
aatggcatacttaagattcat

SEQ ID NO: 3687 - DNA, 21 bp, Severe acute respiratory syndrome coronavirus 2
taatggcatacttaagattca

SEQ ID NO: 3688 - DNA, 21 bp, Severe acute respiratory syndrome coronavirus 2
ctaatggcatacttaagattc

SEQ ID NO: 3689 - DNA, 21 bp, Severe acute respiratory syndrome coronavirus 2
actaatggcatacttaagatt

SEQ ID NO: 3690 - DNA, 21 bp, Severe acute respiratory syndrome coronavirus 2
cactaatggcatacttaagat

SEQ ID NO: 3691 - DNA, 21 bp, Severe acute respiratory syndrome coronavirus 2
gcactaatggcatacttaaga

SEQ ID NO: 3692 - DNA, 21 bp, Severe acute respiratory syndrome coronavirus 2
tgcactaatggcatacttaag

SEQ ID NO: 3693 - DNA, 21 bp, Severe acute respiratory syndrome coronavirus 2
ttgcactaatggcatacttaa

SEQ ID NO: 3694 - DNA, 21 bp, Severe acute respiratory syndrome coronavirus 2
tttgcactaatggcatactta

SEQ ID NO: 3695 - DNA, 21 bp, Severe acute respiratory syndrome coronavirus 2
ctttgcactaatggcatactt

SEQ ID NO: 3696 - DNA, 21 bp, Severe acute respiratory syndrome coronavirus 2
tctttgcactaatggcatact

SEQ ID NO: 3697 - DNA, 21 bp, Severe acute respiratory syndrome coronavirus 2
ttctttgcactaatggcatac

SEQ ID NO: 3698 - DNA, 21 bp, Severe acute respiratory syndrome coronavirus 2
attctttgcactaatggcata

SEQ ID NO: 3699 - DNA, 21 bp, Severe acute respiratory syndrome coronavirus 2
tattctttgcactaatggcat

SEQ ID NO: 3700 - DNA, 21 bp, Severe acute respiratory syndrome coronavirus 2
ctattctttgcactaatggca

SEQ ID NO: 3701 - DNA, 21 bp, Severe acute respiratory syndrome coronavirus 2
tctattctttgcactaatggc

SEQ ID NO: 3702 - DNA, 21 bp, Severe acute respiratory syndrome coronavirus 2
ctctattctttgcactaatgg

SEQ ID NO: 3703 - DNA, 21 bp, Severe acute respiratory syndrome coronavirus 2
gctctattctttgcactaatg

SEQ ID NO: 3704 - DNA, 21 bp, Severe acute respiratory syndrome coronavirus 2
agctctattctttgcactaat

SEQ ID NO: 3705 - DNA, 21 bp, Severe acute respiratory syndrome coronavirus 2
gagctctattctttgcactaa

SEQ ID NO: 3706 - DNA, 21 bp, Severe acute respiratory syndrome coronavirus 2
cgagctctattctttgcacta

SEQ ID NO: 3707 - DNA, 21 bp, Severe acute respiratory syndrome coronavirus 2
gcgagctctattctttgcact

SEQ ID NO: 3708 - DNA, 21 bp, Severe acute respiratory syndrome coronavirus 2
tgcgagctctattctttgcac

SEQ ID NO: 3709 - DNA, 21 bp, Severe acute respiratory syndrome coronavirus 2
gtgcgagctctattctttgca

SEQ ID NO: 3710 - DNA, 21 bp, Severe acute respiratory syndrome coronavirus 2
ggtgcgagctctattctttgc

SEQ ID NO: 3711 - DNA, 21 bp, Severe acute respiratory syndrome coronavirus 2
cggtgcgagctctattctttg

SEQ ID NO: 3712 - DNA, 21 bp, Severe acute respiratory syndrome coronavirus 2
acggtgcgagctctattcttt

SEQ ID NO: 3713 - DNA, 21 bp, Severe acute respiratory syndrome coronavirus 2
tacggtgcgagctctattctt

SEQ ID NO: 3714 - DNA, 21 bp, Severe acute respiratory syndrome coronavirus 2
ctacggtgcgagctctattct

SEQ ID NO: 3715 - DNA, 21 bp, Severe acute respiratory syndrome coronavirus 2
gctacggtgcgagctctattc

SEQ ID NO: 3716 - DNA, 21 bp, Severe acute respiratory syndrome coronavirus 2
agctacggtgcgagctctatt

SEQ ID NO: 3717 - DNA, 21 bp, Severe acute respiratory syndrome coronavirus 2
cagctacggtgcgagctctat

SEQ ID NO: 3718 - DNA, 21 bp, Severe acute respiratory syndrome coronavirus 2
ccagctacggtgcgagctcta

SEQ ID NO: 3719 - DNA, 21 bp, Severe acute respiratory syndrome coronavirus 2
accagctacggtgcgagctct

SEQ ID NO: 3720 - DNA, 21 bp, Severe acute respiratory syndrome coronavirus 2
caccagctacggtgcgagctc

SEQ ID NO: 3721 - DNA, 21 bp, Severe acute respiratory syndrome coronavirus 2
acaccagctacggtgcgagct

SEQ ID NO: 3722 - DNA, 21 bp, Severe acute respiratory syndrome coronavirus 2
gacaccagctacggtgcgagc

SEQ ID NO: 3723 - DNA, 21 bp, Severe acute respiratory syndrome coronavirus 2
agacaccagctacggtgcgag

SEQ ID NO: 3724 - DNA, 21 bp, Severe acute respiratory syndrome coronavirus 2
gagacaccagctacggtgcga

SEQ ID NO: 3725 - DNA, 21 bp, Severe acute respiratory syndrome coronavirus 2
agagacaccagctacggtgcg

SEQ ID NO: 3726 - DNA, 21 bp, Severe acute respiratory syndrome coronavirus 2
tagagacaccagctacggtgc

SEQ ID NO: 3727 - DNA, 21 bp, Severe acute respiratory syndrome coronavirus 2
atagagacaccagctacggtg

SEQ ID NO: 3728 - DNA, 21 bp, Severe acute respiratory syndrome coronavirus 2
gatagagacaccagctacggt

SEQ ID NO: 3729 - DNA, 21 bp, Severe acute respiratory syndrome coronavirus 2
agatagagacaccagctacgg

SEQ ID NO: 3730 - DNA, 21 bp, Severe acute respiratory syndrome coronavirus 2
cagatagagacaccagctacg

SEQ ID NO: 3731 - DNA, 21 bp, Severe acute respiratory syndrome coronavirus 2
acagatagagacaccagctac

SEQ ID NO: 3732 - DNA, 21 bp, Severe acute respiratory syndrome coronavirus 2
tacagatagagacaccagcta

SEQ ID NO: 3733 - DNA, 21 bp, Severe acute respiratory syndrome coronavirus 2
ctacagatagagacaccagct

SEQ ID NO: 3734 - DNA, 21 bp, Severe acute respiratory syndrome coronavirus 2
actacagatagagacaccagc

SEQ ID NO: 3735 - DNA, 21 bp, Severe acute respiratory syndrome coronavirus 2
tactacagatagagacaccag

SEQ ID NO: 3736 - DNA, 21 bp, Severe acute respiratory syndrome coronavirus 2
gtactacagatagagacacca

SEQ ID NO: 3737 - DNA, 21 bp, Severe acute respiratory syndrome coronavirus 2
agtactacagatagagacacc

SEQ ID NO: 3738 - DNA, 21 bp, Severe acute respiratory syndrome coronavirus 2
tagtactacagatagagacac

SEQ ID NO: 3739 - DNA, 21 bp, Severe acute respiratory syndrome coronavirus 2
atagtactacagatagagaca

SEQ ID NO: 3740 - DNA, 21 bp, Severe acute respiratory syndrome coronavirus 2
catagtactacagatagagac

SEQ ID NO: 3741 - DNA, 21 bp, Severe acute respiratory syndrome coronavirus 2
tcatagtactacagatagaga

SEQ ID NO: 3742 - DNA, 21 bp, Severe acute respiratory syndrome coronavirus 2
gtcatagtactacagatagag

SEQ ID NO: 3743 - DNA, 21 bp, Severe acute respiratory syndrome coronavirus 2
tcctctagtggcggctattga

SEQ ID NO: 3744 - DNA, 21 bp, Severe acute respiratory syndrome coronavirus 2
ctcctctagtggcggctattg

SEQ ID NO: 3745 - DNA, 21 bp, Severe acute respiratory syndrome coronavirus 2
gctcctctagtggcggctatt

SEQ ID NO: 3746 - DNA, 21 bp, Severe acute respiratory syndrome coronavirus 2
agctcctctagtggcggctat

SEQ ID NO: 3747 - DNA, 21 bp, Severe acute respiratory syndrome coronavirus 2
tagctcctctagtggcggcta

SEQ ID NO: 3748 - DNA, 21 bp, Severe acute respiratory syndrome coronavirus 2
gtagctcctctagtggcggct

SEQ ID NO: 3749 - DNA, 21 bp, Severe acute respiratory syndrome coronavirus 2
agtagctcctctagtggcggc

SEQ ID NO: 3750 - DNA, 21 bp, Severe acute respiratory syndrome coronavirus 2
cagtagctcctctagtggcgg

SEQ ID NO: 3751 - DNA, 21 bp, Severe acute respiratory syndrome coronavirus 2
acagtagctcctctagtggcg

SEQ ID NO: 3752 - DNA, 21 bp, Severe acute respiratory syndrome coronavirus 2
aagcatgttaggcatggctct

SEQ ID NO: 3753 - DNA, 21 bp, Severe acute respiratory syndrome coronavirus 2
taagcatgttaggcatggctc

SEQ ID NO: 3754 - DNA, 21 bp, Severe acute respiratory syndrome coronavirus 2
ctaagcatgttaggcatggct

SEQ ID NO: 3755 - DNA, 21 bp, Severe acute respiratory syndrome coronavirus 2
atgtttgcgagcaagaacaag

SEQ ID NO: 3756 - DNA, 21 bp, Severe acute respiratory syndrome coronavirus 2
tatgtttgcgagcaagaacaa

SEQ ID NO: 3757 - DNA, 21 bp, Severe acute respiratory syndrome coronavirus 2
actattagcataagcagttgt

SEQ ID NO: 3758 - DNA, 21 bp, Severe acute respiratory syndrome coronavirus 2
cactattagcataagcagttg

SEQ ID NO: 3759 - DNA, 21 bp, Severe acute respiratory syndrome coronavirus 2
acactattagcataagcagtt

SEQ ID NO: 3760 - DNA, 21 bp, Severe acute respiratory syndrome coronavirus 2
atttctatagagacactcata

SEQ ID NO: 3761 - DNA, 21 bp, Severe acute respiratory syndrome coronavirus 2
tatttctatagagacactcat

SEQ ID NO: 3762 - DNA, 21 bp, Severe acute respiratory syndrome coronavirus 2
ctatttctatagagacactca

SEQ ID NO: 3763 - DNA, 21 bp, Severe acute respiratory syndrome coronavirus 2
agtaaggtcagtctcagtcca

SEQ ID NO: 3764 - DNA, 21 bp, Severe acute respiratory syndrome coronavirus 2
tagtaaggtcagtctcagtcc

SEQ ID NO: 3765 - DNA, 21 bp, Severe acute respiratory syndrome coronavirus 2
ttagtaaggtcagtctcagtc

SEQ ID NO: 3766 - DNA, 21 bp, Severe acute respiratory syndrome coronavirus 2
tttagtaaggtcagtctcagt

SEQ ID NO: 3767 - DNA, 21 bp, Severe acute respiratory syndrome coronavirus 2
ctttagtaaggtcagtctcag

SEQ ID NO: 3768 - DNA, 21 bp, Severe acute respiratory syndrome coronavirus 2
cctttagtaaggtcagtctca

SEQ ID NO: 3769 - DNA, 21 bp, Severe acute respiratory syndrome coronavirus 2
tcctttagtaaggtcagtctc

SEQ ID NO: 3770 - DNA, 21 bp, Severe acute respiratory syndrome coronavirus 2
gtcctttagtaaggtcagtct

SEQ ID NO: 3771 - DNA, 21 bp, Severe acute respiratory syndrome coronavirus 2
ggtcctttagtaaggtcagtc

SEQ ID NO: 3772 - DNA, 21 bp, Severe acute respiratory syndrome coronavirus 2
aggtcctttagtaaggtcagt

SEQ ID NO: 3773 - DNA, 21 bp, Severe acute respiratory syndrome coronavirus 2
gaggtcctttagtaaggtcag

SEQ ID NO: 3774 - DNA, 21 bp, Severe acute respiratory syndrome coronavirus 2
tgaggtcctttagtaaggtca

SEQ ID NO: 3775 - DNA, 21 bp, Severe acute respiratory syndrome coronavirus 2
cataagtgtaccatctgtttt

SEQ ID NO: 3776 - DNA, 21 bp, Severe acute respiratory syndrome coronavirus 2
tcataagtgtaccatctgttt

SEQ ID NO: 3777 - DNA, 21 bp, Severe acute respiratory syndrome coronavirus 2
atcataagtgtaccatctgtt

SEQ ID NO: 3778 - DNA, 21 bp, Severe acute respiratory syndrome coronavirus 2
aatcataagtgtaccatctgt

SEQ ID NO: 3779 - DNA, 21 bp, Severe acute respiratory syndrome coronavirus 2
caatcataagtgtaccatctg

SEQ ID NO: 3780 - DNA, 21 bp, Severe acute respiratory syndrome coronavirus 2
tcaatcataagtgtaccatct

SEQ ID NO: 3781 - DNA, 21 bp, Severe acute respiratory syndrome coronavirus 2
atcagcatactcctgattagg

SEQ ID NO: 3782 - DNA, 21 bp, Severe acute respiratory syndrome coronavirus 2
catcagcatactcctgattag

SEQ ID NO: 3783 - DNA, 21 bp, Severe acute respiratory syndrome coronavirus 2
acatcagcatactcctgatta

SEQ ID NO: 3784 - DNA, 21 bp, Severe acute respiratory syndrome coronavirus 2
tttttcaaaggtgtactctcc

SEQ ID NO: 3785 - DNA, 21 bp, Severe acute respiratory syndrome coronavirus 2
ctttttcaaaggtgtactctc

SEQ ID NO: 3786 - DNA, 21 bp, Severe acute respiratory syndrome coronavirus 2
cctttttcaaaggtgtactct

SEQ ID NO: 3787 - DNA, 21 bp, Severe acute respiratory syndrome coronavirus 2
acctttttcaaaggtgtactc

SEQ ID NO: 3788 - DNA, 21 bp, Severe acute respiratory syndrome coronavirus 2
cacctttttcaaaggtgtact

SEQ ID NO: 3789 - DNA, 21 bp, Severe acute respiratory syndrome coronavirus 2
tcacctttttcaaaggtgtac

SEQ ID NO: 3790 - DNA, 21 bp, Severe acute respiratory syndrome coronavirus 2
gtcacctttttcaaaggtgta

SEQ ID NO: 3791 - DNA, 21 bp, Severe acute respiratory syndrome coronavirus 2
agtcacctttttcaaaggtgt

SEQ ID NO: 3792 - DNA, 21 bp, Severe acute respiratory syndrome coronavirus 2
tagtcacctttttcaaaggtg

SEQ ID NO: 3793 - DNA, 21 bp, Severe acute respiratory syndrome coronavirus 2
atagtcacctttttcaaaggt

SEQ ID NO: 3794 - DNA, 21 bp, Severe acute respiratory syndrome coronavirus 2
catagtcacctttttcaaagg

SEQ ID NO: 3795 - DNA, 21 bp, Severe acute respiratory syndrome coronavirus 2
ccatagtcacctttttcaaag

SEQ ID NO: 3796 - DNA, 21 bp, Severe acute respiratory syndrome coronavirus 2
accatagtcacctttttcaaa

SEQ ID NO: 3797 - DNA, 21 bp, Severe acute respiratory syndrome coronavirus 2
caccatagtcacctttttcaa

SEQ ID NO: 3798 - DNA, 21 bp, Severe acute respiratory syndrome coronavirus 2
tcaccatagtcacctttttca

SEQ ID NO: 3799 - DNA, 21 bp, Severe acute respiratory syndrome coronavirus 2
atcaccatagtcacctttttc

SEQ ID NO: 3800 - DNA, 21 bp, Severe acute respiratory syndrome coronavirus 2
catcaccatagtcaccttttt

SEQ ID NO: 3801 - DNA, 21 bp, Severe acute respiratory syndrome coronavirus 2
gcatcaccatagtcacctttt

SEQ ID NO: 3802 - DNA, 21 bp, Severe acute respiratory syndrome coronavirus 2
agcatcaccatagtcaccttt

SEQ ID NO: 3803 - DNA, 21 bp, Severe acute respiratory syndrome coronavirus 2
cagcatcaccatagtcacctt

SEQ ID NO: 3804 - DNA, 21 bp, Severe acute respiratory syndrome coronavirus 2
acagcatcaccatagtcacct

SEQ ID NO: 3805 - DNA, 21 bp, Severe acute respiratory syndrome coronavirus 2
aacagcatcaccatagtcacc

SEQ ID NO: 3806 - DNA, 21 bp, Severe acute respiratory syndrome coronavirus 2
caacagcatcaccatagtcac

SEQ ID NO: 3807 - DNA, 21 bp, Severe acute respiratory syndrome coronavirus 2
acaacagcatcaccatagtca

SEQ ID NO: 3808 - DNA, 21 bp, Severe acute respiratory syndrome coronavirus 2
atagtgctcttgtggcactag

SEQ ID NO: 3809 - DNA, 21 bp, Severe acute respiratory syndrome coronavirus 2
catagtgctcttgtggcacta

SEQ ID NO: 3810 - DNA, 21 bp, Severe acute respiratory syndrome coronavirus 2
acatagtgctcttgtggcact

SEQ ID NO: 3811 - DNA, 21 bp, Severe acute respiratory syndrome coronavirus 2
gctagaaaactcatctgagat

SEQ ID NO: 3812 - DNA, 21 bp, Severe acute respiratory syndrome coronavirus 2
tgctagaaaactcatctgaga

SEQ ID NO: 3813 - DNA, 21 bp, Severe acute respiratory syndrome coronavirus 2
ttgctagaaaactcatctgag

SEQ ID NO: 3814 - DNA, 21 bp, Severe acute respiratory syndrome coronavirus 2
attgctagaaaactcatctga

SEQ ID NO: 3815 - DNA, 21 bp, Severe acute respiratory syndrome coronavirus 2
cattgctagaaaactcatctg

SEQ ID NO: 3816 - DNA, 21 bp, Severe acute respiratory syndrome coronavirus 2
acattgctagaaaactcatct

SEQ ID NO: 3817 - DNA, 21 bp, Severe acute respiratory syndrome coronavirus 2
aacattgctagaaaactcatc

SEQ ID NO: 3818 - DNA, 21 bp, Severe acute respiratory syndrome coronavirus 2
caacattgctagaaaactcat

SEQ ID NO: 3819 - DNA, 21 bp, Severe acute respiratory syndrome coronavirus 2
gcaacattgctagaaaactca

SEQ ID NO: 3820 - DNA, 21 bp, Severe acute respiratory syndrome coronavirus 2
tgcaacattgctagaaaactc

SEQ ID NO: 3821 - DNA, 21 bp, Severe acute respiratory syndrome coronavirus 2
ttgcaacattgctagaaaact

SEQ ID NO: 3822 - DNA, 21 bp, Severe acute respiratory syndrome coronavirus 2
tttgcaacattgctagaaaac

SEQ ID NO: 3823 - DNA, 21 bp, Severe acute respiratory syndrome coronavirus 2
atttgcaacattgctagaaaa

SEQ ID NO: 3824 - DNA, 21 bp, Severe acute respiratory syndrome coronavirus 2
aatttgcaacattgctagaaa

SEQ ID NO: 3825 - DNA, 21 bp, Severe acute respiratory syndrome coronavirus 2
taatttgcaacattgctagaa

SEQ ID NO: 3826 - DNA, 21 bp, Severe acute respiratory syndrome coronavirus 2
cttaccagtaccaggtggtcc

SEQ ID NO: 3827 - DNA, 21 bp, Severe acute respiratory syndrome coronavirus 2
tcttaccagtaccaggtggtc

SEQ ID NO: 3828 - DNA, 21 bp, Severe acute respiratory syndrome coronavirus 2
ctcttaccagtaccaggtggt

SEQ ID NO: 3829 - DNA, 21 bp, Severe acute respiratory syndrome coronavirus 2
actcttaccagtaccaggtgg

SEQ ID NO: 3830 - DNA, 21 bp, Severe acute respiratory syndrome coronavirus 2
gactcttaccagtaccaggtg

SEQ ID NO: 3831 - DNA, 21 bp, Severe acute respiratory syndrome coronavirus 2
tgactcttaccagtaccaggt

SEQ ID NO: 3832 - DNA, 21 bp, Severe acute respiratory syndrome coronavirus 2
atgactcttaccagtaccagg

SEQ ID NO: 3833 - DNA, 21 bp, Severe acute respiratory syndrome coronavirus 2
aatgactcttaccagtaccag

SEQ ID NO: 3834 - DNA, 21 bp, Severe acute respiratory syndrome coronavirus 2
aaatgactcttaccagtacca

SEQ ID NO: 3835 - DNA, 21 bp, Severe acute respiratory syndrome coronavirus 2
aaaatgactcttaccagtacc

SEQ ID NO: 3836 - DNA, 21 bp, Severe acute respiratory syndrome coronavirus 2
caaaatgactcttaccagtac

SEQ ID NO: 3837 - DNA, 21 bp, Severe acute respiratory syndrome coronavirus 2
gcaaaatgactcttaccagta

SEQ ID NO: 3838 - DNA, 21 bp, Severe acute respiratory syndrome coronavirus 2
tgttgaattcactttgaattt

SEQ ID NO: 3839 - DNA, 21 bp, Severe acute respiratory syndrome coronavirus 2
gaggtgtgtaggtgcctgtgt

SEQ ID NO: 3840 - DNA, 21 bp, Severe acute respiratory syndrome coronavirus 2
tgaggtgtgtaggtgcctgtg

SEQ ID NO: 3841 - DNA, 21 bp, Severe acute respiratory syndrome coronavirus 2
ctgaggtgtgtaggtgcctgt

SEQ ID NO: 3842 - DNA, 21 bp, Severe acute respiratory syndrome coronavirus 2
acccatcatagagatgagtct

SEQ ID NO: 3843 - DNA, 21 bp, Severe acute respiratory syndrome coronavirus 2
aacccatcatagagatgagtc

SEQ ID NO: 3844 - DNA, 21 bp, Severe acute respiratory syndrome coronavirus 2
aaacccatcatagagatgagt

SEQ ID NO: 3845 - DNA, 21 bp, Severe acute respiratory syndrome coronavirus 2
agccacattttctaaactctg

SEQ ID NO: 3846 - DNA, 21 bp, Severe acute respiratory syndrome coronavirus 2
aagccacattttctaaactct

SEQ ID NO: 3847 - DNA, 21 bp, Severe acute respiratory syndrome coronavirus 2
tccaattaatgtgactccatt

SEQ ID NO: 3848 - DNA, 21 bp, Severe acute respiratory syndrome coronavirus 2
ctccaattaatgtgactccat

SEQ ID NO: 3849 - DNA, 21 bp, Severe acute respiratory syndrome coronavirus 2
tctccaattaatgtgactcca

SEQ ID NO: 3850 - DNA, 21 bp, Severe acute respiratory syndrome coronavirus 2
ttctccaattaatgtgactcc

SEQ ID NO: 3851 - DNA, 21 bp, Severe acute respiratory syndrome coronavirus 2
aactctgttgttttctctaat

SEQ ID NO: 3852 - DNA, 21 bp, Severe acute respiratory syndrome coronavirus 2
caactctgttgttttctctaa

SEQ ID NO: 3853 - DNA, 21 bp, Severe acute respiratory syndrome coronavirus 2
acaactctgttgttttctcta

SEQ ID NO: 3854 - DNA, 21 bp, Severe acute respiratory syndrome coronavirus 2
ttggttctcatagagaacatt

SEQ ID NO: 3855 - DNA, 21 bp, Severe acute respiratory syndrome coronavirus 2
tttggttctcatagagaacat

SEQ ID NO: 3856 - DNA, 21 bp, Severe acute respiratory syndrome coronavirus 2
ttttggttctcatagagaaca

SEQ ID NO: 3857 - DNA, 21 bp, Severe acute respiratory syndrome coronavirus 2
tttttggttctcatagagaac

SEQ ID NO: 3858 - DNA, 21 bp, Severe acute respiratory syndrome coronavirus 2
agcagcaagattagcagaagc

SEQ ID NO: 3859 - DNA, 21 bp, Severe acute respiratory syndrome coronavirus 2
tagcagcaagattagcagaag

SEQ ID NO: 3860 - DNA, 21 bp, Severe acute respiratory syndrome coronavirus 2
gtagcagcaagattagcagaa

SEQ ID NO: 3861 - DNA, 21 bp, Severe acute respiratory syndrome coronavirus 2
agtagcagcaagattagcaga

SEQ ID NO: 3862 - DNA, 21 bp, Severe acute respiratory syndrome coronavirus 2
tagtagcagcaagattagcag

SEQ ID NO: 3863 - DNA, 21 bp, Severe acute respiratory syndrome coronavirus 2
ttagtagcagcaagattagca

SEQ ID NO: 3864 - DNA, 21 bp, Severe acute respiratory syndrome coronavirus 2
tttagtagcagcaagattagc

SEQ ID NO: 3865 - DNA, 21 bp, Severe acute respiratory syndrome coronavirus 2
ttttagtagcagcaagattag

SEQ ID NO: 3866 - DNA, 21 bp, Severe acute respiratory syndrome coronavirus 2
attttagtagcagcaagatta

SEQ ID NO: 3867 - DNA, 21 bp, Severe acute respiratory syndrome coronavirus 2
cattttagtagcagcaagatt

SEQ ID NO: 3868 - DNA, 21 bp, Severe acute respiratory syndrome coronavirus 2
acattttagtagcagcaagat

SEQ ID NO: 3869 - DNA, 21 bp, Severe acute respiratory syndrome coronavirus 2
gacattttagtagcagcaaga

SEQ ID NO: 3870 - DNA, 21 bp, Severe acute respiratory syndrome coronavirus 2
aactctttttgattgtccaag

SEQ ID NO: 3871 - DNA, 21 bp, Severe acute respiratory syndrome coronavirus 2
caactctttttgattgtccaa

SEQ ID NO: 3872 - DNA, 21 bp, Severe acute respiratory syndrome coronavirus 2
tcaactctttttgattgtcca

SEQ ID NO: 3873 - DNA, 21 bp, Severe acute respiratory syndrome coronavirus 2
aacatctggtgatgtatgatt

SEQ ID NO: 3874 - DNA, 21 bp, Severe acute respiratory syndrome coronavirus 2
caacatctggtgatgtatgat

SEQ ID NO: 3875 - DNA, 21 bp, Severe acute respiratory syndrome coronavirus 2
tcaacatctggtgatgtatga

SEQ ID NO: 3876 - DNA, 21 bp, Severe acute respiratory syndrome coronavirus 2
atcaacatctggtgatgtatg

SEQ ID NO: 3877 - DNA, 21 bp, Severe acute respiratory syndrome coronavirus 2
cattgaggcggtcaatttctt

SEQ ID NO: 3878 - DNA, 21 bp, Severe acute respiratory syndrome coronavirus 2
tcattgaggcggtcaatttct

SEQ ID NO: 3879 - DNA, 21 bp, Severe acute respiratory syndrome coronavirus 2
ctcattgaggcggtcaatttc

SEQ ID NO: 3880 - DNA, 21 bp, Severe acute respiratory syndrome coronavirus 2
cctcattgaggcggtcaattt

SEQ ID NO: 3881 - DNA, 21 bp, Severe acute respiratory syndrome coronavirus 2
acctcattgaggcggtcaatt

SEQ ID NO: 3882 - DNA, 21 bp, Severe acute respiratory syndrome coronavirus 2
ttatgtgtaatgtaatttgac

SEQ ID NO: 3883 - DNA, 21 bp, Severe acute respiratory syndrome coronavirus 2
tttatgtgtaatgtaatttga

SEQ ID NO: 3884 - DNA, 21 bp, Severe acute respiratory syndrome coronavirus 2
gtttatgtgtaatgtaatttg

SEQ ID NO: 3885 - DNA, 21 bp, Severe acute respiratory syndrome coronavirus 2
cgtttatgtgtaatgtaattt

SEQ ID NO: 3886 - DNA, 21 bp, Severe acute respiratory syndrome coronavirus 2
cgaaagggagtgaggcttgta

SEQ ID NO: 3887 - DNA, 21 bp, Severe acute respiratory syndrome coronavirus 2
ccgaaagggagtgaggcttgt

SEQ ID NO: 3888 - DNA, 21 bp, Severe acute respiratory syndrome coronavirus 2
tccgaaagggagtgaggcttg

SEQ ID NO: 3889 - DNA, 21 bp, Severe acute respiratory syndrome coronavirus 2
atccgaaagggagtgaggctt

SEQ ID NO: 3890 - DNA, 21 bp, Severe acute respiratory syndrome coronavirus 2
catccgaaagggagtgaggct

SEQ ID NO: 3891 - DNA, 21 bp, Severe acute respiratory syndrome coronavirus 2
ccatccgaaagggagtgaggc

SEQ ID NO: 3892 - DNA, 21 bp, Severe acute respiratory syndrome coronavirus 2
gccatccgaaagggagtgagg

SEQ ID NO: 3893 - DNA, 21 bp, Severe acute respiratory syndrome coronavirus 2
agccatccgaaagggagtgag

SEQ ID NO: 3894 - DNA, 21 bp, Severe acute respiratory syndrome coronavirus 2
aagccatccgaaagggagtga

SEQ ID NO: 3895 - DNA, 21 bp, Severe acute respiratory syndrome coronavirus 2
cacgctagtagtcgtcgtcgg

SEQ ID NO: 3896 - DNA, 21 bp, Severe acute respiratory syndrome coronavirus 2
gcacgctagtagtcgtcgtcg

SEQ ID NO: 3897 - DNA, 21 bp, Severe acute respiratory syndrome coronavirus 2
ggcacgctagtagtcgtcgtc

SEQ ID NO: 3898 - DNA, 21 bp, Severe acute respiratory syndrome coronavirus 2
aggcacgctagtagtcgtcgt

SEQ ID NO: 3899 - DNA, 21 bp, Severe acute respiratory syndrome coronavirus 2
aaggcacgctagtagtcgtcg

SEQ ID NO: 3900 - DNA, 21 bp, Severe acute respiratory syndrome coronavirus 2
aaaggcacgctagtagtcgtc

SEQ ID NO: 3901 - DNA, 21 bp, Severe acute respiratory syndrome coronavirus 2
caaaggcacgctagtagtcgt

SEQ ID NO: 3902 - DNA, 21 bp, Severe acute respiratory syndrome coronavirus 2
acaaaggcacgctagtagtcg

SEQ ID NO: 3903 - DNA, 21 bp, Severe acute respiratory syndrome coronavirus 2
tacaaaggcacgctagtagtc

SEQ ID NO: 3904 - DNA, 21 bp, Severe acute respiratory syndrome coronavirus 2
ttacaaaggcacgctagtagt

SEQ ID NO: 3905 - DNA, 21 bp, Severe acute respiratory syndrome coronavirus 2
cttacaaaggcacgctagtag

SEQ ID NO: 3906 - DNA, 21 bp, Severe acute respiratory syndrome coronavirus 2
gcttacaaaggcacgctagta

SEQ ID NO: 3907 - DNA, 21 bp, Severe acute respiratory syndrome coronavirus 2
tgcttacaaaggcacgctagt

SEQ ID NO: 3908 - DNA, 21 bp, Severe acute respiratory syndrome coronavirus 2
gtgcttacaaaggcacgctag

SEQ ID NO: 3909 - DNA, 21 bp, Severe acute respiratory syndrome coronavirus 2
tgtgcttacaaaggcacgcta

SEQ ID NO: 3910 - DNA, 21 bp, Severe acute respiratory syndrome coronavirus 2
ttgtgcttacaaaggcacgct

SEQ ID NO: 3911 - DNA, 21 bp, Severe acute respiratory syndrome coronavirus 2
cttgtgcttacaaaggcacgc

SEQ ID NO: 3912 - DNA, 21 bp, Severe acute respiratory syndrome coronavirus 2
gagtacataagttcgtactca

SEQ ID NO: 3913 - DNA, 21 bp, Severe acute respiratory syndrome coronavirus 2
tgagtacataagttcgtactc

SEQ ID NO: 3914 - DNA, 21 bp, Severe acute respiratory syndrome coronavirus 2
atgagtacataagttcgtact

SEQ ID NO: 3915 - DNA, 21 bp, Severe acute respiratory syndrome coronavirus 2
aatgagtacataagttcgtac

SEQ ID NO: 3916 - DNA, 21 bp, Severe acute respiratory syndrome coronavirus 2
gaatgagtacataagttcgta

SEQ ID NO: 3917 - DNA, 21 bp, Severe acute respiratory syndrome coronavirus 2
cgaatgagtacataagttcgt

SEQ ID NO: 3918 - DNA, 21 bp, Severe acute respiratory syndrome coronavirus 2
acgaatgagtacataagttcg

SEQ ID NO: 3919 - DNA, 21 bp, Severe acute respiratory syndrome coronavirus 2
aacgaatgagtacataagttc

SEQ ID NO: 3920 - DNA, 21 bp, Severe acute respiratory syndrome coronavirus 2
aaacgaatgagtacataagtt

SEQ ID NO: 3921 - DNA, 21 bp, Severe acute respiratory syndrome coronavirus 2
gaaacgaatgagtacataagt

SEQ ID NO: 3922 - DNA, 21 bp, Severe acute respiratory syndrome coronavirus 2
cgaaacgaatgagtacataag

SEQ ID NO: 3923 - DNA, 21 bp, Severe acute respiratory syndrome coronavirus 2
ccgaaacgaatgagtacataa

SEQ ID NO: 3924 - DNA, 21 bp, Severe acute respiratory syndrome coronavirus 2
tccgaaacgaatgagtacata

SEQ ID NO: 3925 - DNA, 21 bp, Severe acute respiratory syndrome coronavirus 2
ttccgaaacgaatgagtacat

SEQ ID NO: 3926 - DNA, 21 bp, Severe acute respiratory syndrome coronavirus 2
cttccgaaacgaatgagtaca

SEQ ID NO: 3927 - DNA, 21 bp, Severe acute respiratory syndrome coronavirus 2
tcttccgaaacgaatgagtac

SEQ ID NO: 3928 - DNA, 21 bp, Severe acute respiratory syndrome coronavirus 2
attaactattaacgtacctgt

SEQ ID NO: 3929 - DNA, 21 bp, Severe acute respiratory syndrome coronavirus 2
tattaactattaacgtacctg

SEQ ID NO: 3930 - DNA, 21 bp, Severe acute respiratory syndrome coronavirus 2
ctattaactattaacgtacct

SEQ ID NO: 3931 - DNA, 21 bp, Severe acute respiratory syndrome coronavirus 2
gctattaactattaacgtacc

SEQ ID NO: 3932 - DNA, 21 bp, Severe acute respiratory syndrome coronavirus 2
cgctattaactattaacgtac

SEQ ID NO: 3933 - DNA, 21 bp, Severe acute respiratory syndrome coronavirus 2
acgctattaactattaacgta

SEQ ID NO: 3934 - DNA, 21 bp, Severe acute respiratory syndrome coronavirus 2
tacgctattaactattaacgt

SEQ ID NO: 3935 - DNA, 21 bp, Severe acute respiratory syndrome coronavirus 2
gtacgctattaactattaacg

SEQ ID NO: 3936 - DNA, 21 bp, Severe acute respiratory syndrome coronavirus 2
agtacgctattaactattaac

SEQ ID NO: 3937 - DNA, 21 bp, Severe acute respiratory syndrome coronavirus 2
aagtacgctattaactattaa

SEQ ID NO: 3938 - DNA, 21 bp, Severe acute respiratory syndrome coronavirus 2
gaagtacgctattaactatta

SEQ ID NO: 3939 - DNA, 21 bp, Severe acute respiratory syndrome coronavirus 2
agaagtacgctattaactatt

SEQ ID NO: 3940 - DNA, 21 bp, Severe acute respiratory syndrome coronavirus 2
aagaagtacgctattaactat

SEQ ID NO: 3941 - DNA, 21 bp, Severe acute respiratory syndrome coronavirus 2
aaagaagtacgctattaacta

SEQ ID NO: 3942 - DNA, 21 bp, Severe acute respiratory syndrome coronavirus 2
aaaagaagtacgctattaact

SEQ ID NO: 3943 - DNA, 21 bp, Severe acute respiratory syndrome coronavirus 2
aaaaagaagtacgctattaac

SEQ ID NO: 3944 - DNA, 21 bp, Severe acute respiratory syndrome coronavirus 2
gaaaaagaagtacgctattaa

SEQ ID NO: 3945 - DNA, 21 bp, Severe acute respiratory syndrome coronavirus 2
agaaaaagaagtacgctatta

SEQ ID NO: 3946 - DNA, 21 bp, Severe acute respiratory syndrome coronavirus 2
aagaaaaagaagtacgctatt

SEQ ID NO: 3947 - DNA, 21 bp, Severe acute respiratory syndrome coronavirus 2
caagaaaaagaagtacgctat

SEQ ID NO: 3948 - DNA, 21 bp, Severe acute respiratory syndrome coronavirus 2
gcaagaaaaagaagtacgcta

SEQ ID NO: 3949 - DNA, 21 bp, Severe acute respiratory syndrome coronavirus 2
agcaagaaaaagaagtacgct

SEQ ID NO: 3950 - DNA, 21 bp, Severe acute respiratory syndrome coronavirus 2
aagcaagaaaaagaagtacgc

SEQ ID NO: 3951 - DNA, 21 bp, Severe acute respiratory syndrome coronavirus 2
aaagcaagaaaaagaagtacg

SEQ ID NO: 3952 - DNA, 21 bp, Severe acute respiratory syndrome coronavirus 2
gaaagcaagaaaaagaagtac

SEQ ID NO: 3953 - DNA, 21 bp, Severe acute respiratory syndrome coronavirus 2
cgaaagcaagaaaaagaagta

SEQ ID NO: 3954 - DNA, 21 bp, Severe acute respiratory syndrome coronavirus 2
acgaaagcaagaaaaagaagt

SEQ ID NO: 3955 - DNA, 21 bp, Severe acute respiratory syndrome coronavirus 2
cacgaaagcaagaaaaagaag

SEQ ID NO: 3956 - DNA, 21 bp, Severe acute respiratory syndrome coronavirus 2
ccacgaaagcaagaaaaagaa

SEQ ID NO: 3957 - DNA, 21 bp, Severe acute respiratory syndrome coronavirus 2
accacgaaagcaagaaaaaga

SEQ ID NO: 3958 - DNA, 21 bp, Severe acute respiratory syndrome coronavirus 2
taccacgaaagcaagaaaaag

SEQ ID NO: 3959 - DNA, 21 bp, Severe acute respiratory syndrome coronavirus 2
ataccacgaaagcaagaaaaa

SEQ ID NO: 3960 - DNA, 21 bp, Severe acute respiratory syndrome coronavirus 2
aataccacgaaagcaagaaaa

SEQ ID NO: 3961 - DNA, 21 bp, Severe acute respiratory syndrome coronavirus 2
gaataccacgaaagcaagaaa

SEQ ID NO: 3962 - DNA, 21 bp, Severe acute respiratory syndrome coronavirus 2
agaataccacgaaagcaagaa

SEQ ID NO: 3963 - DNA, 21 bp, Severe acute respiratory syndrome coronavirus 2
aagaataccacgaaagcaaga

SEQ ID NO: 3964 - DNA, 21 bp, Severe acute respiratory syndrome coronavirus 2
caagaataccacgaaagcaag

SEQ ID NO: 3965 - DNA, 21 bp, Severe acute respiratory syndrome coronavirus 2
gcaagaataccacgaaagcaa

SEQ ID NO: 3966 - DNA, 21 bp, Severe acute respiratory syndrome coronavirus 2
agcaagaataccacgaaagca

SEQ ID NO: 3967 - DNA, 21 bp, Severe acute respiratory syndrome coronavirus 2
tagcaagaataccacgaaagc

SEQ ID NO: 3968 - DNA, 21 bp, Severe acute respiratory syndrome coronavirus 2
ctagcaagaataccacgaaag

SEQ ID NO: 3969 - DNA, 21 bp, Severe acute respiratory syndrome coronavirus 2
actagcaagaataccacgaaa

SEQ ID NO: 3970 - DNA, 21 bp, Severe acute respiratory syndrome coronavirus 2
cgcagtaaggatggctagtgt

SEQ ID NO: 3971 - DNA, 21 bp, Severe acute respiratory syndrome coronavirus 2
gcgcagtaaggatggctagtg

SEQ ID NO: 3972 - DNA, 21 bp, Severe acute respiratory syndrome coronavirus 2
agcgcagtaaggatggctagt

SEQ ID NO: 3973 - DNA, 21 bp, Severe acute respiratory syndrome coronavirus 2
aagcgcagtaaggatggctag

SEQ ID NO: 3974 - DNA, 21 bp, Severe acute respiratory syndrome coronavirus 2
gaagcgcagtaaggatggcta

SEQ ID NO: 3975 - DNA, 21 bp, Severe acute respiratory syndrome coronavirus 2
cgaagcgcagtaaggatggct

SEQ ID NO: 3976 - DNA, 21 bp, Severe acute respiratory syndrome coronavirus 2
tcgaagcgcagtaaggatggc

SEQ ID NO: 3977 - DNA, 21 bp, Severe acute respiratory syndrome coronavirus 2
atcgaagcgcagtaaggatgg

SEQ ID NO: 3978 - DNA, 21 bp, Severe acute respiratory syndrome coronavirus 2
aatcgaagcgcagtaaggatg

SEQ ID NO: 3979 - DNA, 21 bp, Severe acute respiratory syndrome coronavirus 2
caatcgaagcgcagtaaggat

SEQ ID NO: 3980 - DNA, 21 bp, Severe acute respiratory syndrome coronavirus 2
acaatcgaagcgcagtaagga

SEQ ID NO: 3981 - DNA, 21 bp, Severe acute respiratory syndrome coronavirus 2
cacaatcgaagcgcagtaagg

SEQ ID NO: 3982 - DNA, 21 bp, Severe acute respiratory syndrome coronavirus 2
acacaatcgaagcgcagtaag

SEQ ID NO: 3983 - DNA, 21 bp, Severe acute respiratory syndrome coronavirus 2
cacacaatcgaagcgcagtaa

SEQ ID NO: 3984 - DNA, 21 bp, Severe acute respiratory syndrome coronavirus 2
gcacacaatcgaagcgcagta

SEQ ID NO: 3985 - DNA, 21 bp, Severe acute respiratory syndrome coronavirus 2
cgcacacaatcgaagcgcagt

SEQ ID NO: 3986 - DNA, 21 bp, Severe acute respiratory syndrome coronavirus 2
acgcacacaatcgaagcgcag

SEQ ID NO: 3987 - DNA, 21 bp, Severe acute respiratory syndrome coronavirus 2
tacgcacacaatcgaagcgca

SEQ ID NO: 3988 - DNA, 21 bp, Severe acute respiratory syndrome coronavirus 2
gtacgcacacaatcgaagcgc

SEQ ID NO: 3989 - DNA, 21 bp, Severe acute respiratory syndrome coronavirus 2
agtacgcacacaatcgaagcg

SEQ ID NO: 3990 - DNA, 21 bp, Severe acute respiratory syndrome coronavirus 2
cagtacgcacacaatcgaagc

SEQ ID NO: 3991 - DNA, 21 bp, Severe acute respiratory syndrome coronavirus 2
gcagtacgcacacaatcgaag

SEQ ID NO: 3992 - DNA, 21 bp, Severe acute respiratory syndrome coronavirus 2
agcagtacgcacacaatcgaa

SEQ ID NO: 3993 - DNA, 21 bp, Severe acute respiratory syndrome coronavirus 2
cagcagtacgcacacaatcga

SEQ ID NO: 3994 - DNA, 21 bp, Severe acute respiratory syndrome coronavirus 2
gcagcagtacgcacacaatcg

SEQ ID NO: 3995 - DNA, 21 bp, Severe acute respiratory syndrome coronavirus 2
tgcagcagtacgcacacaatc

SEQ ID NO: 3996 - DNA, 21 bp, Severe acute respiratory syndrome coronavirus 2
ttgcagcagtacgcacacaat

SEQ ID NO: 3997 - DNA, 21 bp, Severe acute respiratory syndrome coronavirus 2
attgcagcagtacgcacacaa

SEQ ID NO: 3998 - DNA, 21 bp, Severe acute respiratory syndrome coronavirus 2
tattgcagcagtacgcacaca

SEQ ID NO: 3999 - DNA, 21 bp, Severe acute respiratory syndrome coronavirus 2
atattgcagcagtacgcacac

SEQ ID NO: 4000 - DNA, 21 bp, Severe acute respiratory syndrome coronavirus 2
aatattgcagcagtacgcaca

SEQ ID NO: 4001 - DNA, 21 bp, Severe acute respiratory syndrome coronavirus 2
caatattgcagcagtacgcac

SEQ ID NO: 4002 - DNA, 21 bp, Severe acute respiratory syndrome coronavirus 2
acaatattgcagcagtacgca

SEQ ID NO: 4003 - DNA, 21 bp, Severe acute respiratory syndrome coronavirus 2
aacaatattgcagcagtacgc

SEQ ID NO: 4004 - DNA, 21 bp, Severe acute respiratory syndrome coronavirus 2
taacaatattgcagcagtacg

SEQ ID NO: 4005 - DNA, 21 bp, Severe acute respiratory syndrome coronavirus 2
ttaacaatattgcagcagtac

SEQ ID NO: 4006 - DNA, 21 bp, Severe acute respiratory syndrome coronavirus 2
gttaacaatattgcagcagta

SEQ ID NO: 4007 - DNA, 21 bp, Severe acute respiratory syndrome coronavirus 2
cgttaacaatattgcagcagt

SEQ ID NO: 4008 - DNA, 21 bp, Severe acute respiratory syndrome coronavirus 2
acgttaacaatattgcagcag

SEQ ID NO: 4009 - DNA, 21 bp, Severe acute respiratory syndrome coronavirus 2
cacgttaacaatattgcagca

SEQ ID NO: 4010 - DNA, 21 bp, Severe acute respiratory syndrome coronavirus 2
tcacgttaacaatattgcagc

SEQ ID NO: 4011 - DNA, 21 bp, Severe acute respiratory syndrome coronavirus 2
ctcacgttaacaatattgcag

SEQ ID NO: 4012 - DNA, 21 bp, Severe acute respiratory syndrome coronavirus 2
actcacgttaacaatattgca

SEQ ID NO: 4013 - DNA, 21 bp, Severe acute respiratory syndrome coronavirus 2
agaccagaagatcaggaactc

SEQ ID NO: 4014 - DNA, 21 bp, Severe acute respiratory syndrome coronavirus 2
tagaccagaagatcaggaact

SEQ ID NO: 4015 - DNA, 21 bp, Severe acute respiratory syndrome coronavirus 2
ttagaccagaagatcaggaac

SEQ ID NO: 4016 - DNA, 21 bp, Severe acute respiratory syndrome coronavirus 2
tttagaccagaagatcaggaa

SEQ ID NO: 4017 - DNA, 21 bp, Severe acute respiratory syndrome coronavirus 2
gtttagaccagaagatcagga

SEQ ID NO: 4018 - DNA, 21 bp, Severe acute respiratory syndrome coronavirus 2
cgtttagaccagaagatcagg

SEQ ID NO: 4019 - DNA, 21 bp, Severe acute respiratory syndrome coronavirus 2
tcgtttagaccagaagatcag

SEQ ID NO: 4020 - DNA, 21 bp, Severe acute respiratory syndrome coronavirus 2
ttcgtttagaccagaagatca

SEQ ID NO: 4021 - DNA, 21 bp, Severe acute respiratory syndrome coronavirus 2
gttcgtttagaccagaagatc

SEQ ID NO: 4022 - DNA, 21 bp, Severe acute respiratory syndrome coronavirus 2
agttcgtttagaccagaagat

SEQ ID NO: 4023 - DNA, 21 bp, Severe acute respiratory syndrome coronavirus 2
tagttcgtttagaccagaaga

SEQ ID NO: 4024 - DNA, 21 bp, Severe acute respiratory syndrome coronavirus 2
ttagttcgtttagaccagaag

SEQ ID NO: 4025 - DNA, 21 bp, Severe acute respiratory syndrome coronavirus 2
tattactaggttccattgttc

SEQ ID NO: 4026 - DNA, 21 bp, Severe acute respiratory syndrome coronavirus 2
ctattactaggttccattgtt

SEQ ID NO: 4027 - DNA, 21 bp, Severe acute respiratory syndrome coronavirus 2
cctattactaggttccattgt

SEQ ID NO: 4028 - DNA, 21 bp, Severe acute respiratory syndrome coronavirus 2
acctattactaggttccattg

SEQ ID NO: 4029 - DNA, 21 bp, Severe acute respiratory syndrome coronavirus 2
aacctattactaggttccatt

SEQ ID NO: 4030 - DNA, 21 bp, Severe acute respiratory syndrome coronavirus 2
aaacctattactaggttccat

SEQ ID NO: 4031 - DNA, 21 bp, Severe acute respiratory syndrome coronavirus 2
gaaacctattactaggttcca

SEQ ID NO: 4032 - DNA, 21 bp, Severe acute respiratory syndrome coronavirus 2
agaaagcgttcgtgatgtagc

SEQ ID NO: 4033 - DNA, 21 bp, Severe acute respiratory syndrome coronavirus 2
aagaaagcgttcgtgatgtag

SEQ ID NO: 4034 - DNA, 21 bp, Severe acute respiratory syndrome coronavirus 2
taagaaagcgttcgtgatgta

SEQ ID NO: 4035 - DNA, 21 bp, Severe acute respiratory syndrome coronavirus 2
ataagaaagcgttcgtgatgt

SEQ ID NO: 4036 - DNA, 21 bp, Severe acute respiratory syndrome coronavirus 2
aataagaaagcgttcgtgatg

SEQ ID NO: 4037 - DNA, 21 bp, Severe acute respiratory syndrome coronavirus 2
taataagaaagcgttcgtgat

SEQ ID NO: 4038 - DNA, 21 bp, Severe acute respiratory syndrome coronavirus 2
gtaataagaaagcgttcgtga

SEQ ID NO: 4039 - DNA, 21 bp, Severe acute respiratory syndrome coronavirus 2
tgtaataagaaagcgttcgtg

SEQ ID NO: 4040 - DNA, 21 bp, Severe acute respiratory syndrome coronavirus 2
ttgtaataagaaagcgttcgt

SEQ ID NO: 4041 - DNA, 21 bp, Severe acute respiratory syndrome coronavirus 2
tttgtaataagaaagcgttcg

SEQ ID NO: 4042 - DNA, 21 bp, Severe acute respiratory syndrome coronavirus 2
atttgtaataagaaagcgttc

SEQ ID NO: 4043 - DNA, 21 bp, Severe acute respiratory syndrome coronavirus 2
aatttgtaataagaaagcgtt

SEQ ID NO: 4044 - DNA, 21 bp, Severe acute respiratory syndrome coronavirus 2
atctgttgtcacttactgtac

SEQ ID NO: 4045 - DNA, 21 bp, Severe acute respiratory syndrome coronavirus 2
catctgttgtcacttactgta

SEQ ID NO: 4046 - DNA, 21 bp, Severe acute respiratory syndrome coronavirus 2
acatctgttgtcacttactgt

SEQ ID NO: 4047 - DNA, 21 bp, Severe acute respiratory syndrome coronavirus 2
aacatctgttgtcacttactg

SEQ ID NO: 4048 - DNA, 21 bp, Severe acute respiratory syndrome coronavirus 2
aaacatctgttgtcacttact

SEQ ID NO: 4049 - DNA, 21 bp, Severe acute respiratory syndrome coronavirus 2
gaaacatctgttgtcacttac

SEQ ID NO: 4050 - DNA, 21 bp, Severe acute respiratory syndrome coronavirus 2
tgaaacatctgttgtcactta

SEQ ID NO: 4051 - DNA, 21 bp, Severe acute respiratory syndrome coronavirus 2
atgaaacatctgttgtcactt

SEQ ID NO: 4052 - DNA, 21 bp, Severe acute respiratory syndrome coronavirus 2
gatgaaacatctgttgtcact

SEQ ID NO: 4053 - DNA, 21 bp, Severe acute respiratory syndrome coronavirus 2
agatgaaacatctgttgtcac

SEQ ID NO: 4054 - DNA, 21 bp, Severe acute respiratory syndrome coronavirus 2
aattttcatgttcgtttaatc

SEQ ID NO: 4055 - DNA, 21 bp, Severe acute respiratory syndrome coronavirus 2
taattttcatgttcgtttaat

SEQ ID NO: 4056 - DNA, 21 bp, Severe acute respiratory syndrome coronavirus 2
ataattttcatgttcgtttaa

SEQ ID NO: 4057 - DNA, 21 bp, Severe acute respiratory syndrome coronavirus 2
aataattttcatgttcgttta

SEQ ID NO: 4058 - DNA, 21 bp, Severe acute respiratory syndrome coronavirus 2
gaataattttcatgttcgttt

SEQ ID NO: 4059 - DNA, 21 bp, Severe acute respiratory syndrome coronavirus 2
agaataattttcatgttcgtt

SEQ ID NO: 4060 - DNA, 21 bp, Severe acute respiratory syndrome coronavirus 2
aaatggtgaattgccctcgta

SEQ ID NO: 4061 - DNA, 21 bp, Severe acute respiratory syndrome coronavirus 2
gaaatggtgaattgccctcgt

SEQ ID NO: 4062 - DNA, 21 bp, Severe acute respiratory syndrome coronavirus 2
tgaaatggtgaattgccctcg

SEQ ID NO: 4063 - DNA, 21 bp, Severe acute respiratory syndrome coronavirus 2
gcacaaatagaagtcaattaa

SEQ ID NO: 4064 - DNA, 21 bp, Severe acute respiratory syndrome coronavirus 2
agcacaaatagaagtcaatta

SEQ ID NO: 4065 - DNA, 21 bp, Severe acute respiratory syndrome coronavirus 2
aagcacaaatagaagtcaatt

SEQ ID NO: 4066 - DNA, 21 bp, Severe acute respiratory syndrome coronavirus 2
aaagcacaaatagaagtcaat

SEQ ID NO: 4067 - DNA, 21 bp, Severe acute respiratory syndrome coronavirus 2
aaaagcacaaatagaagtcaa

SEQ ID NO: 4068 - DNA, 21 bp, Severe acute respiratory syndrome coronavirus 2
aaaaagcacaaatagaagtca

SEQ ID NO: 4069 - DNA, 21 bp, Severe acute respiratory syndrome coronavirus 2
taaaaagcacaaatagaagtc

SEQ ID NO: 4070 - DNA, 21 bp, Severe acute respiratory syndrome coronavirus 2
ctaaaaagcacaaatagaagt

SEQ ID NO: 4071 - DNA, 21 bp, Severe acute respiratory syndrome coronavirus 2
gctaaaaagcacaaatagaag

SEQ ID NO: 4072 - DNA, 21 bp, Severe acute respiratory syndrome coronavirus 2
ggctaaaaagcacaaatagaa

SEQ ID NO: 4073 - DNA, 21 bp, Severe acute respiratory syndrome coronavirus 2
aggctaaaaagcacaaataga

SEQ ID NO: 4074 - DNA, 21 bp, Severe acute respiratory syndrome coronavirus 2
aaggctaaaaagcacaaatag

SEQ ID NO: 4075 - DNA, 21 bp, Severe acute respiratory syndrome coronavirus 2
aaaggctaaaaagcacaaata

SEQ ID NO: 4076 - DNA, 21 bp, Severe acute respiratory syndrome coronavirus 2
gaaaggctaaaaagcacaaat

SEQ ID NO: 4077 - DNA, 21 bp, Severe acute respiratory syndrome coronavirus 2
agaaaggctaaaaagcacaaa

SEQ ID NO: 4078 - DNA, 21 bp, Severe acute respiratory syndrome coronavirus 2
cagaaaggctaaaaagcacaa

SEQ ID NO: 4079 - DNA, 21 bp, Severe acute respiratory syndrome coronavirus 2
gcagaaaggctaaaaagcaca

SEQ ID NO: 4080 - DNA, 21 bp, Severe acute respiratory syndrome coronavirus 2
agcagaaaggctaaaaagcac

SEQ ID NO: 4081 - DNA, 21 bp, Severe acute respiratory syndrome coronavirus 2
tagcagaaaggctaaaaagca

SEQ ID NO: 4082 - DNA, 21 bp, Severe acute respiratory syndrome coronavirus 2
atagcagaaaggctaaaaagc

SEQ ID NO: 4083 - DNA, 21 bp, Severe acute respiratory syndrome coronavirus 2
aatagcagaaaggctaaaaag

SEQ ID NO: 4084 - DNA, 21 bp, Severe acute respiratory syndrome coronavirus 2
gaatagcagaaaggctaaaaa

SEQ ID NO: 4085 - DNA, 21 bp, Severe acute respiratory syndrome coronavirus 2
ggaatagcagaaaggctaaaa

SEQ ID NO: 4086 - DNA, 21 bp, Severe acute respiratory syndrome coronavirus 2
aggaatagcagaaaggctaaa

SEQ ID NO: 4087 - DNA, 21 bp, Severe acute respiratory syndrome coronavirus 2
aaggaatagcagaaaggctaa

SEQ ID NO: 4088 - DNA, 21 bp, Severe acute respiratory syndrome coronavirus 2
caaggaatagcagaaaggcta

SEQ ID NO: 4089 - DNA, 21 bp, Severe acute respiratory syndrome coronavirus 2
acaaggaatagcagaaaggct

SEQ ID NO: 4090 - DNA, 21 bp, Severe acute respiratory syndrome coronavirus 2
aacaaggaatagcagaaaggc

SEQ ID NO: 4091 - DNA, 21 bp, Severe acute respiratory syndrome coronavirus 2
ggtccattatcagacatttta

SEQ ID NO: 4092 - DNA, 21 bp, Severe acute respiratory syndrome coronavirus 2
gggtccattatcagacatttt

SEQ ID NO: 4093 - DNA, 21 bp, Severe acute respiratory syndrome coronavirus 2
ggggtccattatcagacattt

SEQ ID NO: 4094 - DNA, 21 bp, Severe acute respiratory syndrome coronavirus 2
tggggtccattatcagacatt

SEQ ID NO: 4095 - DNA, 21 bp, Severe acute respiratory syndrome coronavirus 2
ttggggtccattatcagacat

SEQ ID NO: 4096 - DNA, 21 bp, Severe acute respiratory syndrome coronavirus 2
tttggggtccattatcagaca

SEQ ID NO: 4097 - DNA, 21 bp, Severe acute respiratory syndrome coronavirus 2
ttttggggtccattatcagac

SEQ ID NO: 4098 - DNA, 21 bp, Severe acute respiratory syndrome coronavirus 2
attattgggtaaaccttgggg

SEQ ID NO: 4099 - DNA, 21 bp, Severe acute respiratory syndrome coronavirus 2
tattattgggtaaaccttggg

SEQ ID NO: 4100 - DNA, 21 bp, Severe acute respiratory syndrome coronavirus 2
gtattattgggtaaaccttgg

SEQ ID NO: 4101 - DNA, 21 bp, Severe acute respiratory syndrome coronavirus 2
agtattattgggtaaaccttg

SEQ ID NO: 4102 - DNA, 21 bp, Severe acute respiratory syndrome coronavirus 2
cagtattattgggtaaacctt

SEQ ID NO: 4103 - DNA, 21 bp, Severe acute respiratory syndrome coronavirus 2
gcagtattattgggtaaacct

SEQ ID NO: 4104 - DNA, 21 bp, Severe acute respiratory syndrome coronavirus 2
cgcagtattattgggtaaacc

SEQ ID NO: 4105 - DNA, 21 bp, Severe acute respiratory syndrome coronavirus 2
acgcagtattattgggtaaac

SEQ ID NO: 4106 - DNA, 21 bp, Severe acute respiratory syndrome coronavirus 2
gacgcagtattattgggtaaa

SEQ ID NO: 4107 - DNA, 21 bp, Severe acute respiratory syndrome coronavirus 2
agacgcagtattattgggtaa

SEQ ID NO: 4108 - DNA, 21 bp, Severe acute respiratory syndrome coronavirus 2
aagacgcagtattattgggta

SEQ ID NO: 4109 - DNA, 21 bp, Severe acute respiratory syndrome coronavirus 2
caagacgcagtattattgggt

SEQ ID NO: 4110 - DNA, 21 bp, Severe acute respiratory syndrome coronavirus 2
ccaagacgcagtattattggg

SEQ ID NO: 4111 - DNA, 21 bp, Severe acute respiratory syndrome coronavirus 2
accaagacgcagtattattgg

SEQ ID NO: 4112 - DNA, 21 bp, Severe acute respiratory syndrome coronavirus 2
aaccaagacgcagtattattg

SEQ ID NO: 4113 - DNA, 21 bp, Severe acute respiratory syndrome coronavirus 2
gaaccaagacgcagtattatt

SEQ ID NO: 4114 - DNA, 21 bp, Severe acute respiratory syndrome coronavirus 2
tgaaccaagacgcagtattat

SEQ ID NO: 4115 - DNA, 21 bp, Severe acute respiratory syndrome coronavirus 2
gtgaaccaagacgcagtatta

SEQ ID NO: 4116 - DNA, 21 bp, Severe acute respiratory syndrome coronavirus 2
tagtagccaatttggtcatct

SEQ ID NO: 4117 - DNA, 21 bp, Severe acute respiratory syndrome coronavirus 2
gtagtagccaatttggtcatc

SEQ ID NO: 4118 - DNA, 21 bp, Severe acute respiratory syndrome coronavirus 2
ggtagtagccaatttggtcat

SEQ ID NO: 4119 - DNA, 21 bp, Severe acute respiratory syndrome coronavirus 2
cggtagtagccaatttggtca

SEQ ID NO: 4120 - DNA, 21 bp, Severe acute respiratory syndrome coronavirus 2
tcggtagtagccaatttggtc

SEQ ID NO: 4121 - DNA, 21 bp, Severe acute respiratory syndrome coronavirus 2
ttcggtagtagccaatttggt

SEQ ID NO: 4122 - DNA, 21 bp, Severe acute respiratory syndrome coronavirus 2
cttcggtagtagccaatttgg

SEQ ID NO: 4123 - DNA, 21 bp, Severe acute respiratory syndrome coronavirus 2
tcttcggtagtagccaatttg

SEQ ID NO: 4124 - DNA, 21 bp, Severe acute respiratory syndrome coronavirus 2
ctcttcggtagtagccaattt

SEQ ID NO: 4125 - DNA, 21 bp, Severe acute respiratory syndrome coronavirus 2
gctcttcggtagtagccaatt

SEQ ID NO: 4126 - DNA, 21 bp, Severe acute respiratory syndrome coronavirus 2
agctcttcggtagtagccaat

SEQ ID NO: 4127 - DNA, 21 bp, Severe acute respiratory syndrome coronavirus 2
tagctcttcggtagtagccaa

SEQ ID NO: 4128 - DNA, 21 bp, Severe acute respiratory syndrome coronavirus 2
gtagctcttcggtagtagcca

SEQ ID NO: 4129 - DNA, 21 bp, Severe acute respiratory syndrome coronavirus 2
ggtagctcttcggtagtagcc

SEQ ID NO: 4130 - DNA, 21 bp, Severe acute respiratory syndrome coronavirus 2
aggattgcgggtgccaatgtg

SEQ ID NO: 4131 - DNA, 21 bp, Severe acute respiratory syndrome coronavirus 2
ccttgaggaagttgtagcacg

SEQ ID NO: 4132 - DNA, 21 bp, Severe acute respiratory syndrome coronavirus 2
tccttgaggaagttgtagcac

SEQ ID NO: 4133 - DNA, 21 bp, Severe acute respiratory syndrome coronavirus 2
ttccttgaggaagttgtagca

SEQ ID NO: 4134 - DNA, 21 bp, Severe acute respiratory syndrome coronavirus 2
gttccttgaggaagttgtagc

SEQ ID NO: 4135 - DNA, 21 bp, Severe acute respiratory syndrome coronavirus 2
tgttccttgaggaagttgtag

SEQ ID NO: 4136 - DNA, 21 bp, Severe acute respiratory syndrome coronavirus 2
ttgttccttgaggaagttgta

SEQ ID NO: 4137 - DNA, 21 bp, Severe acute respiratory syndrome coronavirus 2
gttgttccttgaggaagttgt

SEQ ID NO: 4138 - DNA, 21 bp, Severe acute respiratory syndrome coronavirus 2
tgttgttccttgaggaagttg

SEQ ID NO: 4139 - DNA, 21 bp, Severe acute respiratory syndrome coronavirus 2
atgttgttccttgaggaagtt

SEQ ID NO: 4140 - DNA, 21 bp, Severe acute respiratory syndrome coronavirus 2
aatgttgttccttgaggaagt

SEQ ID NO: 4141 - DNA, 21 bp, Severe acute respiratory syndrome coronavirus 2
caatgttgttccttgaggaag

SEQ ID NO: 4142 - DNA, 21 bp, Severe acute respiratory syndrome coronavirus 2
gcaatgttgttccttgaggaa

SEQ ID NO: 4143 - DNA, 21 bp, Severe acute respiratory syndrome coronavirus 2
ggcaatgttgttccttgagga

SEQ ID NO: 4144 - DNA, 21 bp, Severe acute respiratory syndrome coronavirus 2
tggcaatgttgttccttgagg

SEQ ID NO: 4145 - DNA, 21 bp, Severe acute respiratory syndrome coronavirus 2
ttggcaatgttgttccttgag

SEQ ID NO: 4146 - DNA, 21 bp, Severe acute respiratory syndrome coronavirus 2
tttggcaatgttgttccttga

SEQ ID NO: 4147 - DNA, 21 bp, Severe acute respiratory syndrome coronavirus 2
ttttggcaatgttgttccttg

SEQ ID NO: 4148 - DNA, 21 bp, Severe acute respiratory syndrome coronavirus 2
cttttggcaatgttgttcctt

SEQ ID NO: 4149 - DNA, 21 bp, Severe acute respiratory syndrome coronavirus 2
ccttttggcaatgttgttcct

SEQ ID NO: 4150 - DNA, 21 bp, Severe acute respiratory syndrome coronavirus 2
gccttttggcaatgttgttcc

SEQ ID NO: 4151 - DNA, 21 bp, Severe acute respiratory syndrome coronavirus 2
agccttttggcaatgttgttc

SEQ ID NO: 4152 - DNA, 21 bp, Severe acute respiratory syndrome coronavirus 2
aagccttttggcaatgttgtt

SEQ ID NO: 4153 - DNA, 21 bp, Severe acute respiratory syndrome coronavirus 2
gaagccttttggcaatgttgt

SEQ ID NO: 4154 - DNA, 21 bp, Severe acute respiratory syndrome coronavirus 2
agaagccttttggcaatgttg

SEQ ID NO: 4155 - DNA, 21 bp, Severe acute respiratory syndrome coronavirus 2
tagaagccttttggcaatgtt

SEQ ID NO: 4156 - DNA, 21 bp, Severe acute respiratory syndrome coronavirus 2
gtagaagccttttggcaatgt

SEQ ID NO: 4157 - DNA, 21 bp, Severe acute respiratory syndrome coronavirus 2
cgtagaagccttttggcaatg

SEQ ID NO: 4158 - DNA, 21 bp, Severe acute respiratory syndrome coronavirus 2
gcgtagaagccttttggcaat

SEQ ID NO: 4159 - DNA, 21 bp, Severe acute respiratory syndrome coronavirus 2
tgcgtagaagccttttggcaa

SEQ ID NO: 4160 - DNA, 21 bp, Severe acute respiratory syndrome coronavirus 2
ctgcgtagaagccttttggca

SEQ ID NO: 4161 - DNA, 21 bp, Severe acute respiratory syndrome coronavirus 2
tctgcgtagaagccttttggc

SEQ ID NO: 4162 - DNA, 21 bp, Severe acute respiratory syndrome coronavirus 2
ggcttgactgccgcctctgct

SEQ ID NO: 4163 - DNA, 21 bp, Severe acute respiratory syndrome coronavirus 2
aggcttgactgccgcctctgc

SEQ ID NO: 4164 - DNA, 21 bp, Severe acute respiratory syndrome coronavirus 2
gaggcttgactgccgcctctg

SEQ ID NO: 4165 - DNA, 21 bp, Severe acute respiratory syndrome coronavirus 2
agaggcttgactgccgcctct

SEQ ID NO: 4166 - DNA, 21 bp, Severe acute respiratory syndrome coronavirus 2
aagaggcttgactgccgcctc

SEQ ID NO: 4167 - DNA, 21 bp, Severe acute respiratory syndrome coronavirus 2
gaagaggcttgactgccgcct

SEQ ID NO: 4168 - DNA, 21 bp, Severe acute respiratory syndrome coronavirus 2
agaagaggcttgactgccgcc

SEQ ID NO: 4169 - DNA, 21 bp, Severe acute respiratory syndrome coronavirus 2
gagaagaggcttgactgccgc

SEQ ID NO: 4170 - DNA, 21 bp, Severe acute respiratory syndrome coronavirus 2
cgagaagaggcttgactgccg

SEQ ID NO: 4171 - DNA, 21 bp, Severe acute respiratory syndrome coronavirus 2
ctcaagctggttcaatctgtc

SEQ ID NO: 4172 - DNA, 21 bp, Severe acute respiratory syndrome coronavirus 2
tctcaagctggttcaatctgt

SEQ ID NO: 4173 - DNA, 21 bp, Severe acute respiratory syndrome coronavirus 2
ctctcaagctggttcaatctg

SEQ ID NO: 4174 - DNA, 21 bp, Severe acute respiratory syndrome coronavirus 2
gctctcaagctggttcaatct

SEQ ID NO: 4175 - DNA, 21 bp, Severe acute respiratory syndrome coronavirus 2
tgctctcaagctggttcaatc

SEQ ID NO: 4176 - DNA, 21 bp, Severe acute respiratory syndrome coronavirus 2
ttgctctcaagctggttcaat

SEQ ID NO: 4177 - DNA, 21 bp, Severe acute respiratory syndrome coronavirus 2
tttgctctcaagctggttcaa

SEQ ID NO: 4178 - DNA, 21 bp, Severe acute respiratory syndrome coronavirus 2
ttgttgttggcctttaccaga

SEQ ID NO: 4179 - DNA, 21 bp, Severe acute respiratory syndrome coronavirus 2
gttgttgttggcctttaccag

SEQ ID NO: 4180 - DNA, 21 bp, Severe acute respiratory syndrome coronavirus 2
tgttgttgttggcctttacca

SEQ ID NO: 4181 - DNA, 21 bp, Severe acute respiratory syndrome coronavirus 2
ttgttgttgttggcctttacc

SEQ ID NO: 4182 - DNA, 21 bp, Severe acute respiratory syndrome coronavirus 2
cttgttgttgttggcctttac

SEQ ID NO: 4183 - DNA, 21 bp, Severe acute respiratory syndrome coronavirus 2
ccttgttgttgttggccttta

SEQ ID NO: 4184 - DNA, 21 bp, Severe acute respiratory syndrome coronavirus 2
gccttgttgttgttggccttt

SEQ ID NO: 4185 - DNA, 21 bp, Severe acute respiratory syndrome coronavirus 2
ggccttgttgttgttggcctt

SEQ ID NO: 4186 - DNA, 21 bp, Severe acute respiratory syndrome coronavirus 2
tggccttgttgttgttggcct

SEQ ID NO: 4187 - DNA, 21 bp, Severe acute respiratory syndrome coronavirus 2
ttggccttgttgttgttggcc

SEQ ID NO: 4188 - DNA, 21 bp, Severe acute respiratory syndrome coronavirus 2
tttggccttgttgttgttggc

SEQ ID NO: 4189 - DNA, 21 bp, Severe acute respiratory syndrome coronavirus 2
gtttggccttgttgttgttgg

SEQ ID NO: 4190 - DNA, 21 bp, Severe acute respiratory syndrome coronavirus 2
agtttggccttgttgttgttg

SEQ ID NO: 4191 - DNA, 21 bp, Severe acute respiratory syndrome coronavirus 2
cagtttggccttgttgttgtt

SEQ ID NO: 4192 - DNA, 21 bp, Severe acute respiratory syndrome coronavirus 2
acagtttggccttgttgttgt

SEQ ID NO: 4193 - DNA, 21 bp, Severe acute respiratory syndrome coronavirus 2
gacagtttggccttgttgttg

SEQ ID NO: 4194 - DNA, 21 bp, Severe acute respiratory syndrome coronavirus 2
tgacagtttggccttgttgtt

SEQ ID NO: 4195 - DNA, 21 bp, Severe acute respiratory syndrome coronavirus 2
gtgacagtttggccttgttgt

SEQ ID NO: 4196 - DNA, 21 bp, Severe acute respiratory syndrome coronavirus 2
agtgacagtttggccttgttg

SEQ ID NO: 4197 - DNA, 21 bp, Severe acute respiratory syndrome coronavirus 2
tagtgacagtttggccttgtt

SEQ ID NO: 4198 - DNA, 21 bp, Severe acute respiratory syndrome coronavirus 2
ttagtgacagtttggccttgt

SEQ ID NO: 4199 - DNA, 21 bp, Severe acute respiratory syndrome coronavirus 2
cttagtgacagtttggccttg

SEQ ID NO: 4200 - DNA, 21 bp, Severe acute respiratory syndrome coronavirus 2
tcttagtgacagtttggcctt

SEQ ID NO: 4201 - DNA, 21 bp, Severe acute respiratory syndrome coronavirus 2
ttcttagtgacagtttggcct

SEQ ID NO: 4202 - DNA, 21 bp, Severe acute respiratory syndrome coronavirus 2
tttcttagtgacagtttggcc

SEQ ID NO: 4203 - DNA, 21 bp, Severe acute respiratory syndrome coronavirus 2
atttcttagtgacagtttggc

SEQ ID NO: 4204 - DNA, 21 bp, Severe acute respiratory syndrome coronavirus 2
gatttcttagtgacagtttgg

SEQ ID NO: 4205 - DNA, 21 bp, Severe acute respiratory syndrome coronavirus 2
agatttcttagtgacagtttg

SEQ ID NO: 4206 - DNA, 21 bp, Severe acute respiratory syndrome coronavirus 2
cagatttcttagtgacagttt

SEQ ID NO: 4207 - DNA, 21 bp, Severe acute respiratory syndrome coronavirus 2
gcagatttcttagtgacagtt

SEQ ID NO: 4208 - DNA, 21 bp, Severe acute respiratory syndrome coronavirus 2
agcagatttcttagtgacagt

SEQ ID NO: 4209 - DNA, 21 bp, Severe acute respiratory syndrome coronavirus 2
cagcagatttcttagtgacag

SEQ ID NO: 4210 - DNA, 21 bp, Severe acute respiratory syndrome coronavirus 2
gcagcagatttcttagtgaca

SEQ ID NO: 4211 - DNA, 21 bp, Severe acute respiratory syndrome coronavirus 2
agcagcagatttcttagtgac

SEQ ID NO: 4212 - DNA, 21 bp, Severe acute respiratory syndrome coronavirus 2
cagcagcagatttcttagtga

SEQ ID NO: 4213 - DNA, 21 bp, Severe acute respiratory syndrome coronavirus 2
tcagcagcagatttcttagtg

SEQ ID NO: 4214 - DNA, 21 bp, Severe acute respiratory syndrome coronavirus 2
ctcagcagcagatttcttagt

SEQ ID NO: 4215 - DNA, 21 bp, Severe acute respiratory syndrome coronavirus 2
cctcagcagcagatttcttag

SEQ ID NO: 4216 - DNA, 21 bp, Severe acute respiratory syndrome coronavirus 2
gcctcagcagcagatttctta

SEQ ID NO: 4217 - DNA, 21 bp, Severe acute respiratory syndrome coronavirus 2
atcagttccttgtctgattag

SEQ ID NO: 4218 - DNA, 21 bp, Severe acute respiratory syndrome coronavirus 2
aatcagttccttgtctgatta

SEQ ID NO: 4219 - DNA, 21 bp, Severe acute respiratory syndrome coronavirus 2
taatcagttccttgtctgatt

SEQ ID NO: 4220 - DNA, 21 bp, Severe acute respiratory syndrome coronavirus 2
gtaatcagttccttgtctgat

SEQ ID NO: 4221 - DNA, 21 bp, Severe acute respiratory syndrome coronavirus 2
tgtaatcagttccttgtctga

SEQ ID NO: 4222 - DNA, 21 bp, Severe acute respiratory syndrome coronavirus 2
ttgtaatcagttccttgtctg

SEQ ID NO: 4223 - DNA, 21 bp, Severe acute respiratory syndrome coronavirus 2
tttgtaatcagttccttgtct

SEQ ID NO: 4224 - DNA, 21 bp, Severe acute respiratory syndrome coronavirus 2
gtttgtaatcagttccttgtc

SEQ ID NO: 4225 - DNA, 21 bp, Severe acute respiratory syndrome coronavirus 2
tgtttgtaatcagttccttgt

SEQ ID NO: 4226 - DNA, 21 bp, Severe acute respiratory syndrome coronavirus 2
aaattgtgcaatttgcggcca

SEQ ID NO: 4227 - DNA, 21 bp, Severe acute respiratory syndrome coronavirus 2
caaattgtgcaatttgcggcc

SEQ ID NO: 4228 - DNA, 21 bp, Severe acute respiratory syndrome coronavirus 2
gcaaattgtgcaatttgcggc

SEQ ID NO: 4229 - DNA, 21 bp, Severe acute respiratory syndrome coronavirus 2
tgtgacttccatgccaatgcg

SEQ ID NO: 4230 - DNA, 21 bp, Severe acute respiratory syndrome coronavirus 2
gtgtgacttccatgccaatgc

SEQ ID NO: 4231 - DNA, 21 bp, Severe acute respiratory syndrome coronavirus 2
ggtgtgacttccatgccaatg

SEQ ID NO: 4232 - DNA, 21 bp, Severe acute respiratory syndrome coronavirus 2
aggtgtgacttccatgccaat

SEQ ID NO: 4233 - DNA, 21 bp, Severe acute respiratory syndrome coronavirus 2
aaggtgtgacttccatgccaa

SEQ ID NO: 4234 - DNA, 21 bp, Severe acute respiratory syndrome coronavirus 2
gaaggtgtgacttccatgcca

SEQ ID NO: 4235 - DNA, 21 bp, Severe acute respiratory syndrome coronavirus 2
cgaaggtgtgacttccatgcc

SEQ ID NO: 4236 - DNA, 21 bp, Severe acute respiratory syndrome coronavirus 2
ccgaaggtgtgacttccatgc

SEQ ID NO: 4237 - DNA, 21 bp, Severe acute respiratory syndrome coronavirus 2
cccgaaggtgtgacttccatg

SEQ ID NO: 4238 - DNA, 21 bp, Severe acute respiratory syndrome coronavirus 2
tcccgaaggtgtgacttccat

SEQ ID NO: 4239 - DNA, 21 bp, Severe acute respiratory syndrome coronavirus 2
ttcccgaaggtgtgacttcca

SEQ ID NO: 4240 - DNA, 21 bp, Severe acute respiratory syndrome coronavirus 2
gttcccgaaggtgtgacttcc

SEQ ID NO: 4241 - DNA, 21 bp, Severe acute respiratory syndrome coronavirus 2
tggatctttgtcatccaattt

SEQ ID NO: 4242 - DNA, 21 bp, Severe acute respiratory syndrome coronavirus 2
gaatgttttgtatgcgtcaat

SEQ ID NO: 4243 - DNA, 21 bp, Severe acute respiratory syndrome coronavirus 2
ggaatgttttgtatgcgtcaa

SEQ ID NO: 4244 - DNA, 21 bp, Severe acute respiratory syndrome coronavirus 2
gggaatgttttgtatgcgtca

SEQ ID NO: 4245 - DNA, 21 bp, Severe acute respiratory syndrome coronavirus 2
tgggaatgttttgtatgcgtc

SEQ ID NO: 4246 - DNA, 21 bp, Severe acute respiratory syndrome coronavirus 2
gtgggaatgttttgtatgcgt

SEQ ID NO: 4247 - DNA, 21 bp, Severe acute respiratory syndrome coronavirus 2
ggtgggaatgttttgtatgcg

SEQ ID NO: 4248 - DNA, 21 bp, Severe acute respiratory syndrome coronavirus 2
tggtgggaatgttttgtatgc

SEQ ID NO: 4249 - DNA, 21 bp, Severe acute respiratory syndrome coronavirus 2
ttggtgggaatgttttgtatg

SEQ ID NO: 4250 - DNA, 21 bp, Severe acute respiratory syndrome coronavirus 2
gttggtgggaatgttttgtat

SEQ ID NO: 4251 - DNA, 21 bp, Severe acute respiratory syndrome coronavirus 2
tgttggtgggaatgttttgta

SEQ ID NO: 4252 - DNA, 21 bp, Severe acute respiratory syndrome coronavirus 2
ctgttggtgggaatgttttgt

SEQ ID NO: 4253 - DNA, 21 bp, Severe acute respiratory syndrome coronavirus 2
tctgttggtgggaatgttttg

SEQ ID NO: 4254 - DNA, 21 bp, Severe acute respiratory syndrome coronavirus 2
ctctgttggtgggaatgtttt

SEQ ID NO: 4255 - DNA, 21 bp, Severe acute respiratory syndrome coronavirus 2
gctctgttggtgggaatgttt

SEQ ID NO: 4256 - DNA, 21 bp, Severe acute respiratory syndrome coronavirus 2
ggctctgttggtgggaatgtt

SEQ ID NO: 4257 - DNA, 21 bp, Severe acute respiratory syndrome coronavirus 2
aggctctgttggtgggaatgt

SEQ ID NO: 4258 - DNA, 21 bp, Severe acute respiratory syndrome coronavirus 2
taggctctgttggtgggaatg

SEQ ID NO: 4259 - DNA, 21 bp, Severe acute respiratory syndrome coronavirus 2
ttaggctctgttggtgggaat

SEQ ID NO: 4260 - DNA, 21 bp, Severe acute respiratory syndrome coronavirus 2
tttaggctctgttggtgggaa

SEQ ID NO: 4261 - DNA, 21 bp, Severe acute respiratory syndrome coronavirus 2
ttttaggctctgttggtggga

SEQ ID NO: 4262 - DNA, 21 bp, Severe acute respiratory syndrome coronavirus 2
tttttaggctctgttggtggg

SEQ ID NO: 4263 - DNA, 21 bp, Severe acute respiratory syndrome coronavirus 2
ctttttaggctctgttggtgg

SEQ ID NO: 4264 - DNA, 21 bp, Severe acute respiratory syndrome coronavirus 2
cctttttaggctctgttggtg

SEQ ID NO: 4265 - DNA, 21 bp, Severe acute respiratory syndrome coronavirus 2
tcctttttaggctctgttggt

SEQ ID NO: 4266 - DNA, 21 bp, Severe acute respiratory syndrome coronavirus 2
gtcctttttaggctctgttgg

SEQ ID NO: 4267 - DNA, 21 bp, Severe acute respiratory syndrome coronavirus 2
tgtcctttttaggctctgttg

SEQ ID NO: 4268 - DNA, 21 bp, Severe acute respiratory syndrome coronavirus 2
ttgtcctttttaggctctgtt

SEQ ID NO: 4269 - DNA, 21 bp, Severe acute respiratory syndrome coronavirus 2
tttgtcctttttaggctctgt

SEQ ID NO: 4270 - DNA, 21 bp, Severe acute respiratory syndrome coronavirus 2
ttttgtcctttttaggctctg

SEQ ID NO: 4271 - DNA, 21 bp, Severe acute respiratory syndrome coronavirus 2
tttttgtcctttttaggctct

SEQ ID NO: 4272 - DNA, 21 bp, Severe acute respiratory syndrome coronavirus 2
ctttttgtcctttttaggctc

SEQ ID NO: 4273 - DNA, 21 bp, Severe acute respiratory syndrome coronavirus 2
tctttttgtcctttttaggct

SEQ ID NO: 4274 - DNA, 21 bp, Severe acute respiratory syndrome coronavirus 2
ttctttttgtcctttttaggc

SEQ ID NO: 4275 - DNA, 21 bp, Severe acute respiratory syndrome coronavirus 2
gcccatctgccttgtgtggtc

SEQ ID NO: 4276 - DNA, 21 bp, Severe acute respiratory syndrome coronavirus 2
agcccatctgccttgtgtggt

SEQ ID NO: 4277 - DNA, 21 bp, Severe acute respiratory syndrome coronavirus 2
tagcccatctgccttgtgtgg

SEQ ID NO: 4278 - DNA, 21 bp, Severe acute respiratory syndrome coronavirus 2
atagcccatctgccttgtgtg

SEQ ID NO: 4279 - DNA, 21 bp, Severe acute respiratory syndrome coronavirus 2
ttctgcacaagagtagactat

SEQ ID NO: 4280 - DNA, 21 bp, Severe acute respiratory syndrome coronavirus 2
attctgcacaagagtagacta

SEQ ID NO: 4281 - DNA, 21 bp, Severe acute respiratory syndrome coronavirus 2
cattctgcacaagagtagact

SEQ ID NO: 4282 - DNA, 21 bp, Severe acute respiratory syndrome coronavirus 2
tcattctgcacaagagtagac

SEQ ID NO: 4283 - DNA, 21 bp, Severe acute respiratory syndrome coronavirus 2
ttcattctgcacaagagtaga

SEQ ID NO: 4284 - DNA, 21 bp, Severe acute respiratory syndrome coronavirus 2
attcattctgcacaagagtag

SEQ ID NO: 4285 - DNA, 21 bp, Severe acute respiratory syndrome coronavirus 2
aattcattctgcacaagagta

SEQ ID NO: 4286 - DNA, 21 bp, Severe acute respiratory syndrome coronavirus 2
gaattcattctgcacaagagt

SEQ ID NO: 4287 - DNA, 21 bp, Severe acute respiratory syndrome coronavirus 2
agaattcattctgcacaagag

SEQ ID NO: 4288 - DNA, 21 bp, Severe acute respiratory syndrome coronavirus 2
gagaattcattctgcacaaga

SEQ ID NO: 4289 - DNA, 21 bp, Severe acute respiratory syndrome coronavirus 2
cgagaattcattctgcacaag

SEQ ID NO: 4290 - DNA, 21 bp, Severe acute respiratory syndrome coronavirus 2
acgagaattcattctgcacaa

SEQ ID NO: 4291 - DNA, 21 bp, Severe acute respiratory syndrome coronavirus 2
tacgagaattcattctgcaca

SEQ ID NO: 4292 - DNA, 21 bp, Severe acute respiratory syndrome coronavirus 2
atgtgagattaaagttaacta

SEQ ID NO: 4293 - DNA, 21 bp, Severe acute respiratory syndrome coronavirus 2
tatgtgagattaaagttaact

SEQ ID NO: 4294 - DNA, 21 bp, Severe acute respiratory syndrome coronavirus 2
ctatgtgagattaaagttaac

SEQ ID NO: 4295 - DNA, 21 bp, Severe acute respiratory syndrome coronavirus 2
gctatgtgagattaaagttaa

SEQ ID NO: 4296 - DNA, 21 bp, Severe acute respiratory syndrome coronavirus 2
tgctatgtgagattaaagtta

SEQ ID NO: 4297 - DNA, 21 bp, Severe acute respiratory syndrome coronavirus 2
ttgctatgtgagattaaagtt

SEQ ID NO: 4298 - DNA, 21 bp, Severe acute respiratory syndrome coronavirus 2
attgctatgtgagattaaagt

SEQ ID NO: 4299 - DNA, 21 bp, Severe acute respiratory syndrome coronavirus 2
gattgctatgtgagattaaag

SEQ ID NO: 4300 - DNA, 21 bp, Severe acute respiratory syndrome coronavirus 2
agattgctatgtgagattaaa

SEQ ID NO: 4301 - DNA, 21 bp, Severe acute respiratory syndrome coronavirus 2
aagattgctatgtgagattaa

SEQ ID NO: 4302 - DNA, 21 bp, Severe acute respiratory syndrome coronavirus 2
aaagattgctatgtgagatta

SEQ ID NO: 4303 - DNA, 21 bp, Severe acute respiratory syndrome coronavirus 2
taaagattgctatgtgagatt

SEQ ID NO: 4304 - DNA, 21 bp, Severe acute respiratory syndrome coronavirus 2
ttaaagattgctatgtgagat

SEQ ID NO: 4305 - DNA, 21 bp, Severe acute respiratory syndrome coronavirus 2
attaaagattgctatgtgaga

SEQ ID NO: 4306 - DNA, 21 bp, Severe acute respiratory syndrome coronavirus 2
gattaaagattgctatgtgag

SEQ ID NO: 4307 - DNA, 21 bp, Severe acute respiratory syndrome coronavirus 2
tgattaaagattgctatgtga

SEQ ID NO: 4308 - DNA, 21 bp, Severe acute respiratory syndrome coronavirus 2
agtcctccctaatgttacaca

SEQ ID NO: 4309 - DNA, 21 bp, Severe acute respiratory syndrome coronavirus 2
aagtcctccctaatgttacac

SEQ ID NO: 4310 - DNA, 21 bp, Severe acute respiratory syndrome coronavirus 2
caagtcctccctaatgttaca

SEQ ID NO: 4311 - DNA, 21 bp, Severe acute respiratory syndrome coronavirus 2
tcaagtcctccctaatgttac

SEQ ID NO: 4312 - DNA, 21 bp, Severe acute respiratory syndrome coronavirus 2
ttcaagtcctccctaatgtta

SEQ ID NO: 4313 - DNA, 21 bp, Severe acute respiratory syndrome coronavirus 2
tttcaagtcctccctaatgtt

SEQ ID NO: 4314 - DNA, 21 bp, Severe acute respiratory syndrome coronavirus 2
ctttcaagtcctccctaatgt

SEQ ID NO: 4315 - DNA, 21 bp, Severe acute respiratory syndrome coronavirus 2
tctttcaagtcctccctaatg

SEQ ID NO: 4316 - DNA, 21 bp, Severe acute respiratory syndrome coronavirus 2
ctctttcaagtcctccctaat

SEQ ID NO: 4317 - DNA, 21 bp, Severe acute respiratory syndrome coronavirus 2
gctctttcaagtcctccctaa

SEQ ID NO: 4318 - DNA, 21 bp, Severe acute respiratory syndrome coronavirus 2
ggctctttcaagtcctcccta

SEQ ID NO: 4319 - DNA, 21 bp, Severe acute respiratory syndrome coronavirus 2
tggctctttcaagtcctccct

SEQ ID NO: 4320 - DNA, 21 bp, Severe acute respiratory syndrome coronavirus 2
gtggctctttcaagtcctccc

SEQ ID NO: 4321 - DNA, 21 bp, Severe acute respiratory syndrome coronavirus 2
ggtggctctttcaagtcctcc

SEQ ID NO: 4322 - DNA, 21 bp, Severe acute respiratory syndrome coronavirus 2
tggtggctctttcaagtcctc

SEQ ID NO: 4323 - DNA, 21 bp, Severe acute respiratory syndrome coronavirus 2
gtggtggctctttcaagtcct

SEQ ID NO: 4324 - DNA, 21 bp, Severe acute respiratory syndrome coronavirus 2
tgtggtggctctttcaagtcc

SEQ ID NO: 4325 - DNA, 21 bp, Severe acute respiratory syndrome coronavirus 2
atgtggtggctctttcaagtc

SEQ ID NO: 4326 - DNA, 21 bp, Severe acute respiratory syndrome coronavirus 2
aatgtggtggctctttcaagt

SEQ ID NO: 4327 - DNA, 21 bp, Severe acute respiratory syndrome coronavirus 2
aaatgtggtggctctttcaag

SEQ ID NO: 4328 - DNA, 21 bp, Severe acute respiratory syndrome coronavirus 2
aaaatgtggtggctctttcaa

SEQ ID NO: 4329 - DNA, 21 bp, Severe acute respiratory syndrome coronavirus 2
gaaaatgtggtggctctttca

SEQ ID NO: 4330 - DNA, 21 bp, Severe acute respiratory syndrome coronavirus 2
tgaaaatgtggtggctctttc

SEQ ID NO: 4331 - DNA, 21 bp, Severe acute respiratory syndrome coronavirus 2
atcgtactccgcgtggcctcg

SEQ ID NO: 4332 - DNA, 21 bp, Severe acute respiratory syndrome coronavirus 2
gatcgtactccgcgtggcctc

SEQ ID NO: 4333 - DNA, 21 bp, Severe acute respiratory syndrome coronavirus 2
cgatcgtactccgcgtggcct

SEQ ID NO: 4334 - DNA, 21 bp, Severe acute respiratory syndrome coronavirus 2
tcgatcgtactccgcgtggcc

SEQ ID NO: 4335 - DNA, 21 bp, Severe acute respiratory syndrome coronavirus 2
ctcgatcgtactccgcgtggc

SEQ ID NO: 4336 - DNA, 21 bp, Severe acute respiratory syndrome coronavirus 2
taggcagctctccctagcatt

SEQ ID NO: 4337 - DNA, 21 bp, Severe acute respiratory syndrome coronavirus 2
ataggcagctctccctagcat

SEQ ID NO: 4338 - DNA, 21 bp, Severe acute respiratory syndrome coronavirus 2
tataggcagctctccctagca

SEQ ID NO: 4339 - DNA, 21 bp, Severe acute respiratory syndrome coronavirus 2
atataggcagctctccctagc

SEQ ID NO: 4340 - DNA, 21 bp, Severe acute respiratory syndrome coronavirus 2
catataggcagctctccctag

SEQ ID NO: 4341 - DNA, 21 bp, Severe acute respiratory syndrome coronavirus 2
ccatataggcagctctcccta

SEQ ID NO: 4342 - DNA, 21 bp, Severe acute respiratory syndrome coronavirus 2
tccatataggcagctctccct

SEQ ID NO: 4343 - DNA, 21 bp, Severe acute respiratory syndrome coronavirus 2
ttccatataggcagctctccc

SEQ ID NO: 4344 - DNA, 21 bp, Severe acute respiratory syndrome coronavirus 2
cttccatataggcagctctcc

SEQ ID NO: 4345 - DNA, 21 bp, Severe acute respiratory syndrome coronavirus 2
tcttccatataggcagctctc

SEQ ID NO: 4346 - DNA, 21 bp, Severe acute respiratory syndrome coronavirus 2
ctcttccatataggcagctct

SEQ ID NO: 4347 - DNA, 21 bp, Severe acute respiratory syndrome coronavirus 2
gctcttccatataggcagctc

SEQ ID NO: 4348 - DNA, 21 bp, Severe acute respiratory syndrome coronavirus 2
ggctcttccatataggcagct

SEQ ID NO: 4349 - DNA, 21 bp, Severe acute respiratory syndrome coronavirus 2
gggctcttccatataggcagc

SEQ ID NO: 4350 - DNA, 21 bp, Severe acute respiratory syndrome coronavirus 2
agggctcttccatataggcag

SEQ ID NO: 4351 - DNA, 21 bp, Severe acute respiratory syndrome coronavirus 2
tagggctcttccatataggca

SEQ ID NO: 4352 - DNA, 21 bp, Severe acute respiratory syndrome coronavirus 2
ttagggctcttccatataggc

SEQ ID NO: 4353 - DNA, 21 bp, Severe acute respiratory syndrome coronavirus 2
attagggctcttccatatagg

SEQ ID NO: 4354 - DNA, 21 bp, Severe acute respiratory syndrome coronavirus 2
cattagggctcttccatatag

SEQ ID NO: 4355 - DNA, 21 bp, Severe acute respiratory syndrome coronavirus 2
acattagggctcttccatata

SEQ ID NO: 4356 - DNA, 21 bp, Severe acute respiratory syndrome coronavirus 2
cacattagggctcttccatat

SEQ ID NO: 4357 - DNA, 21 bp, Severe acute respiratory syndrome coronavirus 2
acacattagggctcttccata

SEQ ID NO: 4358 - DNA, 21 bp, Severe acute respiratory syndrome coronavirus 2
tacacattagggctcttccat

SEQ ID NO: 4359 - DNA, 21 bp, Severe acute respiratory syndrome coronavirus 2
ttacacattagggctcttcca

SEQ ID NO: 4360 - DNA, 21 bp, Severe acute respiratory syndrome coronavirus 2
tttacacattagggctcttcc

SEQ ID NO: 4361 - DNA, 21 bp, Severe acute respiratory syndrome coronavirus 2
ttttacacattagggctcttc

SEQ ID NO: 4362 - DNA, 21 bp, Severe acute respiratory syndrome coronavirus 2
attttacacattagggctctt

SEQ ID NO: 4363 - DNA, 21 bp, Severe acute respiratory syndrome coronavirus 2
aattttacacattagggctct

SEQ ID NO: 4364 - DNA, 21 bp, Severe acute respiratory syndrome coronavirus 2
taattttacacattagggctc

SEQ ID NO: 4365 - DNA, 21 bp, Severe acute respiratory syndrome coronavirus 2
ttaattttacacattagggct

SEQ ID NO: 4366 - DNA, 21 bp, Severe acute respiratory syndrome coronavirus 2
attaattttacacattagggc

SEQ ID NO: 4367 - DNA, 21 bp, Severe acute respiratory syndrome coronavirus 2
aattaattttacacattaggg

SEQ ID NO: 4368 - DNA, 21 bp, Severe acute respiratory syndrome coronavirus 2
aaattaattttacacattagg

SEQ ID NO: 4369 - DNA, 21 bp, Severe acute respiratory syndrome coronavirus 2
aaaattaattttacacattag

SEQ ID NO: 4370 - DNA, 21 bp, Severe acute respiratory syndrome coronavirus 2
taaaattaattttacacatta

SEQ ID NO: 4371 - DNA, 21 bp, Severe acute respiratory syndrome coronavirus 2
ctaaaattaattttacacatt

SEQ ID NO: 4372 - DNA, 21 bp, Severe acute respiratory syndrome coronavirus 2
actaaaattaattttacacat

SEQ ID NO: 4373 - DNA, 21 bp, Severe acute respiratory syndrome coronavirus 2
tactaaaattaattttacaca

SEQ ID NO: 4374 - DNA, 21 bp, Severe acute respiratory syndrome coronavirus 2
ctactaaaattaattttacac

SEQ ID NO: 4375-4382 - skipped (8 entries)

SEQ ID NO: 4383 - DNA, 21 bp, Artificial Sequence
  Description of Artificial Sequence: Synthetic oligonucleotide
  Description of Combined DNA/RNA Molecule: Synthetic oligonucleotide
gcuccuaauuacacucaactt

SEQ ID NO: 4384 - DNA, 21 bp, Artificial Sequence
  Description of Artificial Sequence: Synthetic oligonucleotide
  Description of Combined DNA/RNA Molecule: Synthetic oligonucleotide
ggaugaggaaggcaauuuatt

SEQ ID NO: 4385 - DNA, 21 bp, Artificial Sequence
  Description of Artificial Sequence: Synthetic oligonucleotide
  Description of Combined DNA/RNA Molecule: Synthetic oligonucleotide
ccgcuggagagcaacugcatt

SEQ ID NO: 4386 - DNA, 21 bp, Artificial Sequence
  Description of Artificial Sequence: Synthetic oligonucleotide
  Description of Combined DNA/RNA Molecule: Synthetic oligonucleotide
gcuaugaaacgauaugggctt

SEQ ID NO: 4387 - DNA, 21 bp, Artificial Sequence
  Description of Artificial Sequence: Synthetic oligonucleotide
  Description of Combined DNA/RNA Molecule: Synthetic oligonucleotide
uagcagcauuaccauccugtt

SEQ ID NO: 4388 - DNA, 21 bp, Artificial Sequence
  Description of Artificial Sequence: Synthetic oligonucleotide
  Description of Combined DNA/RNA Molecule: Synthetic oligonucleotide
caacacggacgaaaccguatt

SEQ ID NO: 4389 - DNA, 21 bp, Artificial Sequence
  Description of Artificial Sequence: Synthetic oligonucleotide
  Description of Combined DNA/RNA Molecule: Synthetic oligonucleotide
cacguccaacucaguuugctt

SEQ ID NO: 4390 - DNA, 21 bp, Artificial Sequence
  Description of Artificial Sequence: Synthetic oligonucleotide
  Description of Combined DNA/RNA Molecule: Synthetic oligonucleotide
ugaacagcccuauguguuctt

SEQ ID NO: 4391 - DNA, 21 bp, Artificial Sequence
  Description of Artificial Sequence: Synthetic oligonucleotide
  Description of Combined DNA/RNA Molecule: Synthetic oligonucleotide
acgagcuuggcacugaucctt

SEQ ID NO: 4392 - DNA, 21 bp, Artificial Sequence
  Description of Artificial Sequence: Synthetic oligonucleotide
  Description of Combined DNA/RNA Molecule: Synthetic oligonucleotide
ucaugugguaguguugguutt

SEQ ID NO: 4393 - DNA, 21 bp, Artificial Sequence
  Description of Artificial Sequence: Synthetic oligonucleotide
  Description of Combined DNA/RNA Molecule: Synthetic oligonucleotide
acaacauuaucaacaaugctt

SEQ ID NO: 4394 - DNA, 21 bp, Artificial Sequence
  Description of Artificial Sequence: Synthetic oligonucleotide
  Description of Combined DNA/RNA Molecule: Synthetic oligonucleotide
aaaccuacaaggugguucctt

SEQ ID NO: 4395 - DNA, 21 bp, Artificial Sequence
  Description of Artificial Sequence: Synthetic oligonucleotide
  Description of Combined DNA/RNA Molecule: Synthetic oligonucleotide
cguuuuuaaacggguuugctt

SEQ ID NO: 4396 - DNA, 21 bp, Artificial Sequence
  Description of Artificial Sequence: Synthetic oligonucleotide
  Description of Combined DNA/RNA Molecule: Synthetic oligonucleotide
gugccgcacgguguaagactt

SEQ ID NO: 4397 - DNA, 21 bp, Artificial Sequence
  Description of Artificial Sequence: Synthetic oligonucleotide
  Description of Combined DNA/RNA Molecule: Synthetic oligonucleotide
ugacgugauauaugugguatt

SEQ ID NO: 4398 - DNA, 21 bp, Artificial Sequence
  Description of Artificial Sequence: Synthetic oligonucleotide
  Description of Combined DNA/RNA Molecule: Synthetic oligonucleotide
ggauguaaacuuacauagctt

SEQ ID NO: 4399 - DNA, 21 bp, Artificial Sequence
  Description of Artificial Sequence: Synthetic oligonucleotide
  Description of Combined DNA/RNA Molecule: Synthetic oligonucleotide
accggguuugacaguuugatt

SEQ ID NO: 4400 - DNA, 21 bp, Artificial Sequence
  Description of Artificial Sequence: Synthetic oligonucleotide
  Description of Combined DNA/RNA Molecule: Synthetic oligonucleotide
ugucaaacccgguaauuuutt

SEQ ID NO: 4401 - DNA, 21 bp, Artificial Sequence
  Description of Artificial Sequence: Synthetic oligonucleotide
  Description of Combined DNA/RNA Molecule: Synthetic oligonucleotide
uaaguaugccauuagugcatt

SEQ ID NO: 4402 - DNA, 21 bp, Artificial Sequence
  Description of Artificial Sequence: Synthetic oligonucleotide
  Description of Combined DNA/RNA Molecule: Synthetic oligonucleotide
ugccauuagugcaaagaautt

SEQ ID NO: 4403 - DNA, 21 bp, Artificial Sequence
  Description of Artificial Sequence: Synthetic oligonucleotide
  Description of Combined DNA/RNA Molecule: Synthetic oligonucleotide
gcgagcucuauucuuugcatt

SEQ ID NO: 4404 - DNA, 21 bp, Artificial Sequence
  Description of Artificial Sequence: Synthetic oligonucleotide
  Description of Combined DNA/RNA Molecule: Synthetic oligonucleotide
gacaccagcuacggugcgatt

SEQ ID NO: 4405 - DNA, 21 bp, Artificial Sequence
  Description of Artificial Sequence: Synthetic oligonucleotide
  Description of Combined DNA/RNA Molecule: Synthetic oligonucleotide
caauagccgccacuagaggtt

SEQ ID NO: 4406 - DNA, 21 bp, Artificial Sequence
  Description of Artificial Sequence: Synthetic oligonucleotide
  Description of Combined DNA/RNA Molecule: Synthetic oligonucleotide
acugcuuaugcuaauagugtt

SEQ ID NO: 4407 - DNA, 21 bp, Artificial Sequence
  Description of Artificial Sequence: Synthetic oligonucleotide
  Description of Combined DNA/RNA Molecule: Synthetic oligonucleotide
acaucagcauacuccugautt

SEQ ID NO: 4408 - DNA, 21 bp, Artificial Sequence
  Description of Artificial Sequence: Synthetic oligonucleotide
  Description of Combined DNA/RNA Molecule: Synthetic oligonucleotide
uaggagguaugagcuauuatt

SEQ ID NO: 4409 - DNA, 21 bp, Artificial Sequence
  Description of Artificial Sequence: Synthetic oligonucleotide
  Description of Combined DNA/RNA Molecule: Synthetic oligonucleotide
acuauggugaugcuguugutt

SEQ ID NO: 4410 - DNA, 21 bp, Artificial Sequence
  Description of Artificial Sequence: Synthetic oligonucleotide
  Description of Combined DNA/RNA Molecule: Synthetic oligonucleotide
acauagugcucuuguggcatt

SEQ ID NO: 4411 - DNA, 21 bp, Artificial Sequence
  Description of Artificial Sequence: Synthetic oligonucleotide
  Description of Combined DNA/RNA Molecule: Synthetic oligonucleotide
uauacacuaugcgagcagatt

SEQ ID NO: 4412 - DNA, 21 bp, Artificial Sequence
  Description of Artificial Sequence: Synthetic oligonucleotide
  Description of Combined DNA/RNA Molecule: Synthetic oligonucleotide
aauucaaagugaauucaactt

SEQ ID NO: 4413 - DNA, 21 bp, Artificial Sequence
  Description of Artificial Sequence: Synthetic oligonucleotide
  Description of Combined DNA/RNA Molecule: Synthetic oligonucleotide
aggaacaugucuggaccuatt

SEQ ID NO: 4414 - DNA, 21 bp, Artificial Sequence
  Description of Artificial Sequence: Synthetic oligonucleotide
  Description of Combined DNA/RNA Molecule: Synthetic oligonucleotide
ugaauaugacauagucauatt

SEQ ID NO: 4415 - DNA, 21 bp, Artificial Sequence
  Description of Artificial Sequence: Synthetic oligonucleotide
  Description of Combined DNA/RNA Molecule: Synthetic oligonucleotide
uuugagcuuugggcuaagctt

SEQ ID NO: 4416 - DNA, 21 bp, Artificial Sequence
  Description of Artificial Sequence: Synthetic oligonucleotide
  Description of Combined DNA/RNA Molecule: Synthetic oligonucleotide
uaaugaugaaugucgcaaatt

SEQ ID NO: 4417 - DNA, 21 bp, Artificial Sequence
  Description of Artificial Sequence: Synthetic oligonucleotide
  Description of Combined DNA/RNA Molecule: Synthetic oligonucleotide
gaguacgaacuuauguacutt

SEQ ID NO: 4418 - DNA, 21 bp, Artificial Sequence
  Description of Artificial Sequence: Synthetic oligonucleotide
  Description of Combined DNA/RNA Molecule: Synthetic oligonucleotide
gguacguuaauaguuaauatt

SEQ ID NO: 4419 - DNA, 21 bp, Artificial Sequence
  Description of Artificial Sequence: Synthetic oligonucleotide
  Description of Combined DNA/RNA Molecule: Synthetic oligonucleotide
gaaaaagaaguacgcuauutt

SEQ ID NO: 4420 - DNA, 21 bp, Artificial Sequence
  Description of Artificial Sequence: Synthetic oligonucleotide
  Description of Combined DNA/RNA Molecule: Synthetic oligonucleotide
gcaagaauaccacgaaagctt

SEQ ID NO: 4421 - DNA, 21 bp, Artificial Sequence
  Description of Artificial Sequence: Synthetic oligonucleotide
  Description of Combined DNA/RNA Molecule: Synthetic oligonucleotide
acaaucgaagcgcaguaagtt

SEQ ID NO: 4422 - DNA, 21 bp, Artificial Sequence
  Description of Artificial Sequence: Synthetic oligonucleotide
  Description of Combined DNA/RNA Molecule: Synthetic oligonucleotide
uucuggucuaaacgaacuatt

SEQ ID NO: 4423 - DNA, 21 bp, Artificial Sequence
  Description of Artificial Sequence: Synthetic oligonucleotide
  Description of Combined DNA/RNA Molecule: Synthetic oligonucleotide
uaauaagaaagcguucgugtt

SEQ ID NO: 4424 - DNA, 21 bp, Artificial Sequence
  Description of Artificial Sequence: Synthetic oligonucleotide
  Description of Combined DNA/RNA Molecule: Synthetic oligonucleotide
uguaugcagcaaaaccugatt

SEQ ID NO: 4425 - DNA, 21 bp, Artificial Sequence
  Description of Artificial Sequence: Synthetic oligonucleotide
  Description of Combined DNA/RNA Molecule: Synthetic oligonucleotide
caucuguugucacuuacugtt

SEQ ID NO: 4426 - DNA, 21 bp, Artificial Sequence
  Description of Artificial Sequence: Synthetic oligonucleotide
  Description of Combined DNA/RNA Molecule: Synthetic oligonucleotide
uacccaauaauacugcguctt

SEQ ID NO: 4427 - DNA, 21 bp, Artificial Sequence
  Description of Artificial Sequence: Synthetic oligonucleotide
  Description of Combined DNA/RNA Molecule: Synthetic oligonucleotide
cuucgguaguagccaauuutt

SEQ ID NO: 4428 - DNA, 21 bp, Artificial Sequence
  Description of Artificial Sequence: Synthetic oligonucleotide
  Description of Combined DNA/RNA Molecule: Synthetic oligonucleotide
caaaaggcuucuacgcagatt

SEQ ID NO: 4429 - DNA, 21 bp, Artificial Sequence
  Description of Artificial Sequence: Synthetic oligonucleotide
  Description of Combined DNA/RNA Molecule: Synthetic oligonucleotide
ugucacuaagaaaucugcutt

SEQ ID NO: 4430 - DNA, 21 bp, Artificial Sequence
  Description of Artificial Sequence: Synthetic oligonucleotide
  Description of Combined DNA/RNA Molecule: Synthetic oligonucleotide
gacaaggaacugauuacaatt

SEQ ID NO: 4431 - DNA, 21 bp, Artificial Sequence
  Description of Artificial Sequence: Synthetic oligonucleotide
  Description of Combined DNA/RNA Molecule: Synthetic oligonucleotide
cauggaagucacaccuucgtt

SEQ ID NO: 4432 - DNA, 21 bp, Artificial Sequence
  Description of Artificial Sequence: Synthetic oligonucleotide
  Description of Combined DNA/RNA Molecule: Synthetic oligonucleotide
cauucugcacaagaguagatt

SEQ ID NO: 4433 - DNA, 21 bp, Artificial Sequence
  Description of Artificial Sequence: Synthetic oligonucleotide
  Description of Combined DNA/RNA Molecule: Synthetic oligonucleotide
cacauagcaaucuuuaauctt

SEQ ID NO: 4434 - DNA, 21 bp, Artificial Sequence
  Description of Artificial Sequence: Synthetic oligonucleotide
  Description of Combined DNA/RNA Molecule: Synthetic oligonucleotide
aaaugugguggcucuuucatt

SEQ ID NO: 4435 - DNA, 21 bp, Artificial Sequence
  Description of Artificial Sequence: Synthetic oligonucleotide
  Description of Combined DNA/RNA Molecule: Synthetic oligonucleotide
uuuacacauuagggcucuutt

SEQ ID NO: 4436 - RNA, 21 nt, Artificial Sequence
  Description of Artificial Sequence: Synthetic oligonucleotide
uacgguuucguccguguugca

SEQ ID NO: 4437 - DNA, 23 bp, Artificial Sequence
  Description of Artificial Sequence: Synthetic oligonucleotide
  Description of Combined DNA/RNA Molecule: Synthetic oligonucleotide
aacugaguuggacguguguuutt

SEQ ID NO: 4438 - RNA, 21 nt, Artificial Sequence
  Description of Artificial Sequence: Synthetic oligonucleotide
ugaacagcccuauguguucau

SEQ ID NO: 4439 - RNA, 21 nt, Artificial Sequence
  Description of Artificial Sequence: Synthetic oligonucleotide
uauuuaaaacuuacugacaau

SEQ ID NO: 4440 - DNA, 23 bp, Artificial Sequence
  Description of Artificial Sequence: Synthetic oligonucleotide
  Description of Combined DNA/RNA Molecule: Synthetic oligonucleotide
uuuuccacuacuucuucagagtt

SEQ ID NO: 4441 - DNA, 23 bp, Artificial Sequence
  Description of Artificial Sequence: Synthetic oligonucleotide
  Description of Combined DNA/RNA Molecule: Synthetic oligonucleotide
uguuaaaaccaacacuaccactt

SEQ ID NO: 4442 - DNA, 23 bp, Artificial Sequence
  Description of Artificial Sequence: Synthetic oligonucleotide
  Description of Combined DNA/RNA Molecule: Synthetic oligonucleotide
guaacaaaccuacaagguggutt

SEQ ID NO: 4443 - RNA, 21 nt, Artificial Sequence
  Description of Artificial Sequence: Synthetic oligonucleotide
uguuguguacacacacuggua

SEQ ID NO: 4444 - RNA, 21 nt, Artificial Sequence
  Description of Artificial Sequence: Synthetic oligonucleotide
aaagguuauggcuguaguugu

SEQ ID NO: 4445 - DNA, 23 bp, Artificial Sequence
  Description of Artificial Sequence: Synthetic oligonucleotide
  Description of Combined DNA/RNA Molecule: Synthetic oligonucleotide
uuacaccgcaaacccguuuaatt

SEQ ID NO: 4446 - RNA, 21 nt, Artificial Sequence
  Description of Artificial Sequence: Synthetic oligonucleotide
guguaagugcagcccgucuua

SEQ ID NO: 4447 - RNA, 21 nt, Artificial Sequence
  Description of Artificial Sequence: Synthetic oligonucleotide
acaugguaccacauauaucac

SEQ ID NO: 4448 - DNA, 23 bp, Artificial Sequence
  Description of Artificial Sequence: Synthetic oligonucleotide
  Description of Combined DNA/RNA Molecule: Synthetic oligonucleotide
uuaccggguuugacaguuugatt

SEQ ID NO: 4449 - DNA, 23 bp, Artificial Sequence
  Description of Artificial Sequence: Synthetic oligonucleotide
  Description of Combined DNA/RNA Molecule: Synthetic oligonucleotide
ugagcaaagaagaaguguuuutt

SEQ ID NO: 4450 - DNA, 23 bp, Artificial Sequence
  Description of Artificial Sequence: Synthetic oligonucleotide
  Description of Combined DNA/RNA Molecule: Synthetic oligonucleotide
agccaccaucguaacaaucaatt

SEQ ID NO: 4451 - RNA, 21 nt, Artificial Sequence
  Description of Artificial Sequence: Synthetic oligonucleotide
aaaugaaucuuaaguaugcca

SEQ ID NO: 4452 - DNA, 23 bp, Artificial Sequence
  Description of Artificial Sequence: Synthetic oligonucleotide
  Description of Combined DNA/RNA Molecule: Synthetic oligonucleotide
auucuuugcacuaauggcauatt

SEQ ID NO: 4453 - DNA, 23 bp, Artificial Sequence
  Description of Artificial Sequence: Synthetic oligonucleotide
  Description of Combined DNA/RNA Molecule: Synthetic oligonucleotide
cuauucuuugcacuaauggcatt

SEQ ID NO: 4454 - DNA, 23 bp, Artificial Sequence
  Description of Artificial Sequence: Synthetic oligonucleotide
  Description of Combined DNA/RNA Molecule: Synthetic oligonucleotide
cuacggugcgagcucuauucutt

SEQ ID NO: 4455 - RNA, 21 nt, Artificial Sequence
  Description of Artificial Sequence: Synthetic oligonucleotide
auagagcucgcaccguagcug

SEQ ID NO: 4456 - RNA, 21 nt, Artificial Sequence
  Description of Artificial Sequence: Synthetic oligonucleotide
ucgcaccguagcuggugucuc

SEQ ID NO: 4457 - RNA, 21 nt, Artificial Sequence
  Description of Artificial Sequence: Synthetic oligonucleotide
aacugcuuaugcuaauagugu

SEQ ID NO: 4458 - DNA, 23 bp, Artificial Sequence
  Description of Artificial Sequence: Synthetic oligonucleotide
  Description of Combined DNA/RNA Molecule: Synthetic oligonucleotide
uuaguaaggucagucucaguctt

SEQ ID NO: 4459 - DNA, 23 bp, Artificial Sequence
  Description of Artificial Sequence: Synthetic oligonucleotide
  Description of Combined DNA/RNA Molecule: Synthetic oligonucleotide
accuuuuucaaagguguacuctt

SEQ ID NO: 4460 - RNA, 21 nt, Artificial Sequence
  Description of Artificial Sequence: Synthetic oligonucleotide
ugguacugguaagagucauuu

SEQ ID NO: 4461 - RNA, 21 nt, Artificial Sequence
  Description of Artificial Sequence: Synthetic oligonucleotide
ucugcuaaucuugcugcuacu

SEQ ID NO: 4462 - DNA, 23 bp, Artificial Sequence
  Description of Artificial Sequence: Synthetic oligonucleotide
  Description of Combined DNA/RNA Molecule: Synthetic oligonucleotide
cgcuauuaacuauuaacguactt

SEQ ID NO: 4463 - RNA, 21 nt, Artificial Sequence
  Description of Artificial Sequence: Synthetic oligonucleotide
uucuugcuuucgugguauucu

SEQ ID NO: 4464 - RNA, 21 nt, Artificial Sequence
  Description of Artificial Sequence: Synthetic oligonucleotide
cuuacugcgcuucgauugugu

SEQ ID NO: 4465 - RNA, 21 nt, Artificial Sequence
  Description of Artificial Sequence: Synthetic oligonucleotide
cgcuucgauugugugcguacu

SEQ ID NO: 4466 - DNA, 23 bp, Artificial Sequence
  Description of Artificial Sequence: Synthetic oligonucleotide
  Description of Combined DNA/RNA Molecule: Synthetic oligonucleotide
uaacaauauugcagcaguacgtt

SEQ ID NO: 4467 - DNA, 23 bp, Artificial Sequence
  Description of Artificial Sequence: Synthetic oligonucleotide
  Description of Combined DNA/RNA Molecule: Synthetic oligonucleotide
ucguuuagaccagaagaucagtt

SEQ ID NO: 4468 - RNA, 21 nt, Artificial Sequence
  Description of Artificial Sequence: Synthetic oligonucleotide
ucacgaacgcuuucuuauuac

SEQ ID NO: 4469 - RNA, 21 nt, Artificial Sequence
  Description of Artificial Sequence: Synthetic oligonucleotide
uaaacgaacaugaaaauuauu

SEQ ID NO: 4470 - RNA, 21 nt, Artificial Sequence
  Description of Artificial Sequence: Synthetic oligonucleotide
aauugacuucuauuugugcuu

SEQ ID NO: 4471 - RNA, 21 nt, Artificial Sequence
  Description of Artificial Sequence: Synthetic oligonucleotide
caauaauacugcgucuugguu

SEQ ID NO: 4472 - RNA, 21 nt, Artificial Sequence
  Description of Artificial Sequence: Synthetic oligonucleotide
auuggcuacuaccgaagagcu

SEQ ID NO: 4473 - DNA, 23 bp, Artificial Sequence
  Description of Artificial Sequence: Synthetic oligonucleotide
  Description of Combined DNA/RNA Molecule: Synthetic oligonucleotide
ccuugaggaaguuguagcacgtt

SEQ ID NO: 4474 - DNA, 23 bp, Artificial Sequence
  Description of Artificial Sequence: Synthetic oligonucleotide
  Description of Combined DNA/RNA Molecule: Synthetic oligonucleotide
ugcucucaagcugguucaauctt

SEQ ID NO: 4475 - RNA, 21 nt, Artificial Sequence
  Description of Artificial Sequence: Synthetic oligonucleotide
ugguaaaggccaacaacaaca

SEQ ID NO: 4476 - DNA, 23 bp, Artificial Sequence
  Description of Artificial Sequence: Synthetic oligonucleotide
  Description of Combined DNA/RNA Molecule: Synthetic oligonucleotide
gccucagcagcagauuucuuatt

SEQ ID NO: 4477 - DNA, 23 bp, Artificial Sequence
  Description of Artificial Sequence: Synthetic oligonucleotide
  Description of Combined DNA/RNA Molecule: Synthetic oligonucleotide
uuuguaaucaguuccuugucutt

SEQ ID NO: 4478 - RNA, 21 nt, Artificial Sequence
  Description of Artificial Sequence: Synthetic oligonucleotide
aaauuggaugacaaagaucca

SEQ ID NO: 4479 - DNA, 23 bp, Artificial Sequence
  Description of Artificial Sequence: Synthetic oligonucleotide
  Description of Combined DNA/RNA Molecule: Synthetic oligonucleotide
ccuuuuuaggcucuguuggugtt

SEQ ID NO: 4480 - RNA, 21 nt, Artificial Sequence
  Description of Artificial Sequence: Synthetic oligonucleotide
cuacucuugugcagaaugaau

SEQ ID NO: 4481 - DNA, 23 bp, Artificial Sequence
  Description of Artificial Sequence: Synthetic oligonucleotide
  Description of Combined DNA/RNA Molecule: Synthetic oligonucleotide
ucgaucguacuccgcguggcctt

SEQ ID NO: 4482 - DNA, 23 bp, Artificial Sequence
  Description of Artificial Sequence: Synthetic oligonucleotide
  Description of Combined DNA/RNA Molecule: Synthetic oligonucleotide
uuuuacacauuagggcucuuctt

SEQ ID NO: 4483 - DNA, 21 bp, Artificial Sequence
  Description of Artificial Sequence: Synthetic oligonucleotide
  Description of Combined DNA/RNA Molecule: Synthetic oligonucleotide
uacgguuucguccguguugtt

SEQ ID NO: 4484 - DNA, 21 bp, Artificial Sequence
  Description of Artificial Sequence: Synthetic oligonucleotide
  Description of Combined DNA/RNA Molecule: Synthetic oligonucleotide
gcaaacugaguuggacgugtt

SEQ ID NO: 4485 - DNA, 21 bp, Artificial Sequence
  Description of Artificial Sequence: Synthetic oligonucleotide
  Description of Combined DNA/RNA Molecule: Synthetic oligonucleotide
ugaacagcccuauguguuctt

SEQ ID NO: 4486 - DNA, 21 bp, Artificial Sequence
  Description of Artificial Sequence: Synthetic oligonucleotide
  Description of Combined DNA/RNA Molecule: Synthetic oligonucleotide
acgagcuuggcacugaucctt

SEQ ID NO: 4487 - DNA, 21 bp, Artificial Sequence
  Description of Artificial Sequence: Synthetic oligonucleotide
  Description of Combined DNA/RNA Molecule: Synthetic oligonucleotide
ucaugugguaguguugguutt

SEQ ID NO: 4488 - DNA, 21 bp, Artificial Sequence
  Description of Artificial Sequence: Synthetic oligonucleotide
  Description of Combined DNA/RNA Molecule: Synthetic oligonucleotide
acaacauuaucaacaaugctt

SEQ ID NO: 4489 - DNA, 21 bp, Artificial Sequence
  Description of Artificial Sequence: Synthetic oligonucleotide
  Description of Combined DNA/RNA Molecule: Synthetic oligonucleotide
aaaccuacaaggugguucctt

SEQ ID NO: 4490 - DNA, 21 bp, Artificial Sequence
  Description of Artificial Sequence: Synthetic oligonucleotide
  Description of Combined DNA/RNA Molecule: Synthetic oligonucleotide
cguuuuuaaacggguuugctt

SEQ ID NO: 4491 - DNA, 21 bp, Artificial Sequence
  Description of Artificial Sequence: Synthetic oligonucleotide
  Description of Combined DNA/RNA Molecule: Synthetic oligonucleotide
gugccgcacgguguaagactt

SEQ ID NO: 4492 - DNA, 21 bp, Artificial Sequence
  Description of Artificial Sequence: Synthetic oligonucleotide
  Description of Combined DNA/RNA Molecule: Synthetic oligonucleotide
uaccacauauaucacgucatt

SEQ ID NO: 4493 - DNA, 21 bp, Artificial Sequence
  Description of Artificial Sequence: Synthetic oligonucleotide
  Description of Combined DNA/RNA Molecule: Synthetic oligonucleotide
gcuauguaaguuuacaucctt

SEQ ID NO: 4494 - DNA, 21 bp, Artificial Sequence
  Description of Artificial Sequence: Synthetic oligonucleotide
  Description of Combined DNA/RNA Molecule: Synthetic oligonucleotide
accggguuugacaguuugatt

SEQ ID NO: 4495 - DNA, 21 bp, Artificial Sequence
  Description of Artificial Sequence: Synthetic oligonucleotide
  Description of Combined DNA/RNA Molecule: Synthetic oligonucleotide
ugucaaacccgguaauuuutt

SEQ ID NO: 4496 - DNA, 21 bp, Artificial Sequence
  Description of Artificial Sequence: Synthetic oligonucleotide
  Description of Combined DNA/RNA Molecule: Synthetic oligonucleotide
uaaguaugccauuagugcatt

SEQ ID NO: 4497 - DNA, 21 bp, Artificial Sequence
  Description of Artificial Sequence: Synthetic oligonucleotide
  Description of Combined DNA/RNA Molecule: Synthetic oligonucleotide
auucuuugcacuaauggcatt

SEQ ID NO: 4498 - DNA, 21 bp, Artificial Sequence
  Description of Artificial Sequence: Synthetic oligonucleotide
  Description of Combined DNA/RNA Molecule: Synthetic oligonucleotide
gcgagcucuauucuuugcatt

SEQ ID NO: 4499 - DNA, 21 bp, Artificial Sequence
  Description of Artificial Sequence: Synthetic oligonucleotide
  Description of Combined DNA/RNA Molecule: Synthetic oligonucleotide
gacaccagcuacggugcgatt

SEQ ID NO: 4500 - DNA, 21 bp, Artificial Sequence
  Description of Artificial Sequence: Synthetic oligonucleotide
  Description of Combined DNA/RNA Molecule: Synthetic oligonucleotide
caauagccgccacuagaggtt

SEQ ID NO: 4501 - DNA, 21 bp, Artificial Sequence
  Description of Artificial Sequence: Synthetic oligonucleotide
  Description of Combined DNA/RNA Molecule: Synthetic oligonucleotide
cacuauuagcauaagcagutt

SEQ ID NO: 4502 - DNA, 21 bp, Artificial Sequence
  Description of Artificial Sequence: Synthetic oligonucleotide
  Description of Combined DNA/RNA Molecule: Synthetic oligonucleotide
aucaggaguaugcugaugutt

SEQ ID NO: 4503 - DNA, 21 bp, Artificial Sequence
  Description of Artificial Sequence: Synthetic oligonucleotide
  Description of Combined DNA/RNA Molecule: Synthetic oligonucleotide
uaauagcucauaccuccuatt

SEQ ID NO: 4504 - DNA, 21 bp, Artificial Sequence
  Description of Artificial Sequence: Synthetic oligonucleotide
  Description of Combined DNA/RNA Molecule: Synthetic oligonucleotide
acuauggugaugcuguugutt

SEQ ID NO: 4505 - DNA, 21 bp, Artificial Sequence
  Description of Artificial Sequence: Synthetic oligonucleotide
  Description of Combined DNA/RNA Molecule: Synthetic oligonucleotide
ugccacaagagcacuaugutt

SEQ ID NO: 4506 - DNA, 21 bp, Artificial Sequence
  Description of Artificial Sequence: Synthetic oligonucleotide
  Description of Combined DNA/RNA Molecule: Synthetic oligonucleotide
uauacacuaugcgagcagatt

SEQ ID NO: 4507 - DNA, 21 bp, Artificial Sequence
  Description of Artificial Sequence: Synthetic oligonucleotide
  Description of Combined DNA/RNA Molecule: Synthetic oligonucleotide
aauucaaagugaauucaactt

SEQ ID NO: 4508 - DNA, 21 bp, Artificial Sequence
  Description of Artificial Sequence: Synthetic oligonucleotide
  Description of Combined DNA/RNA Molecule: Synthetic oligonucleotide
aggaacaugucuggaccuatt

SEQ ID NO: 4509 - DNA, 21 bp, Artificial Sequence
  Description of Artificial Sequence: Synthetic oligonucleotide
  Description of Combined DNA/RNA Molecule: Synthetic oligonucleotide
ugaauaugacauagucauatt

SEQ ID NO: 4510 - DNA, 21 bp, Artificial Sequence
  Description of Artificial Sequence: Synthetic oligonucleotide
  Description of Combined DNA/RNA Molecule: Synthetic oligonucleotide
uuugagcuuugggcuaagctt

SEQ ID NO: 4511 - DNA, 21 bp, Artificial Sequence
  Description of Artificial Sequence: Synthetic oligonucleotide
  Description of Combined DNA/RNA Molecule: Synthetic oligonucleotide
uuugcgacauucaucauuatt

SEQ ID NO: 4512 - DNA, 21 bp, Artificial Sequence
  Description of Artificial Sequence: Synthetic oligonucleotide
  Description of Combined DNA/RNA Molecule: Synthetic oligonucleotide
gaguacgaacuuauguacutt

SEQ ID NO: 4513 - DNA, 21 bp, Artificial Sequence
  Description of Artificial Sequence: Synthetic oligonucleotide
  Description of Combined DNA/RNA Molecule: Synthetic oligonucleotide
gguacguuaauaguuaauatt

SEQ ID NO: 4514 - DNA, 21 bp, Artificial Sequence
  Description of Artificial Sequence: Synthetic oligonucleotide
  Description of Combined DNA/RNA Molecule: Synthetic oligonucleotide
gaaaaagaaguacgcuauutt

SEQ ID NO: 4515 - DNA, 21 bp, Artificial Sequence
  Description of Artificial Sequence: Synthetic oligonucleotide
  Description of Combined DNA/RNA Molecule: Synthetic oligonucleotide
gcaagaauaccacgaaagctt

SEQ ID NO: 4516 - DNA, 21 bp, Artificial Sequence
  Description of Artificial Sequence: Synthetic oligonucleotide
  Description of Combined DNA/RNA Molecule: Synthetic oligonucleotide
cuuacugcgcuucgauugutt

SEQ ID NO: 4517 - DNA, 21 bp, Artificial Sequence
  Description of Artificial Sequence: Synthetic oligonucleotide
  Description of Combined DNA/RNA Molecule: Synthetic oligonucleotide
uucuggucuaaacgaacuatt

SEQ ID NO: 4518 - DNA, 21 bp, Artificial Sequence
  Description of Artificial Sequence: Synthetic oligonucleotide
  Description of Combined DNA/RNA Molecule: Synthetic oligonucleotide
uaauaagaaagcguucgugtt

SEQ ID NO: 4519 - DNA, 21 bp, Artificial Sequence
  Description of Artificial Sequence: Synthetic oligonucleotide
  Description of Combined DNA/RNA Molecule: Synthetic oligonucleotide
ucagguuuugcugcauacatt

SEQ ID NO: 4520 - DNA, 21 bp, Artificial Sequence
  Description of Artificial Sequence: Synthetic oligonucleotide
  Description of Combined DNA/RNA Molecule: Synthetic oligonucleotide
caucuguugucacuuacugtt

SEQ ID NO: 4521 - DNA, 21 bp, Artificial Sequence
  Description of Artificial Sequence: Synthetic oligonucleotide
  Description of Combined DNA/RNA Molecule: Synthetic oligonucleotide
gacgcaguauuauuggguatt

SEQ ID NO: 4522 - DNA, 21 bp, Artificial Sequence
  Description of Artificial Sequence: Synthetic oligonucleotide
  Description of Combined DNA/RNA Molecule: Synthetic oligonucleotide
aaauuggcuacuaccgaagtt

SEQ ID NO: 4523 - DNA, 21 bp, Artificial Sequence
  Description of Artificial Sequence: Synthetic oligonucleotide
  Description of Combined DNA/RNA Molecule: Synthetic oligonucleotide
caaaaggcuucuacgcagatt

SEQ ID NO: 4524 - DNA, 21 bp, Artificial Sequence
  Description of Artificial Sequence: Synthetic oligonucleotide
  Description of Combined DNA/RNA Molecule: Synthetic oligonucleotide
ugucacuaagaaaucugcutt

SEQ ID NO: 4525 - DNA, 21 bp, Artificial Sequence
  Description of Artificial Sequence: Synthetic oligonucleotide
  Description of Combined DNA/RNA Molecule: Synthetic oligonucleotide
uuguaaucaguuccuuguctt

SEQ ID NO: 4526 - DNA, 21 bp, Artificial Sequence
  Description of Artificial Sequence: Synthetic oligonucleotide
  Description of Combined DNA/RNA Molecule: Synthetic oligonucleotide
cauggaagucacaccuucgtt

SEQ ID NO: 4527 - DNA, 21 bp, Artificial Sequence
  Description of Artificial Sequence: Synthetic oligonucleotide
  Description of Combined DNA/RNA Molecule: Synthetic oligonucleotide
ucuacucuugugcagaaugtt

SEQ ID NO: 4528 - DNA, 21 bp, Artificial Sequence
  Description of Artificial Sequence: Synthetic oligonucleotide
  Description of Combined DNA/RNA Molecule: Synthetic oligonucleotide
cacauagcaaucuuuaauctt

SEQ ID NO: 4529 - DNA, 21 bp, Artificial Sequence
  Description of Artificial Sequence: Synthetic oligonucleotide
  Description of Combined DNA/RNA Molecule: Synthetic oligonucleotide
ugaaagagccaccacauuutt

SEQ ID NO: 4530 - DNA, 21 bp, Artificial Sequence
  Description of Artificial Sequence: Synthetic oligonucleotide
  Description of Combined DNA/RNA Molecule: Synthetic oligonucleotide
aagagcccuaauguguaaatt

SEQ ID NO: 4531 - DNA, 23 bp, Artificial Sequence
  Description of Artificial Sequence: Synthetic oligonucleotide
  Description of Combined DNA/RNA Molecule: Synthetic oligonucleotide
ugcaacacggacgaaaccguatt

SEQ ID NO: 4532 - RNA, 21 nt, Artificial Sequence
  Description of Artificial Sequence: Synthetic oligonucleotide
aaacacacguccaacucaguu

SEQ ID NO: 4533 - DNA, 23 bp, Artificial Sequence
  Description of Artificial Sequence: Synthetic oligonucleotide
  Description of Combined DNA/RNA Molecule: Synthetic oligonucleotide
augaacacauagggcuguucatt

SEQ ID NO: 4534 - RNA, 21 nt, Artificial Sequence
  Description of Artificial Sequence: Synthetic oligonucleotide
uauuuaaaacuuacugacaau

SEQ ID NO: 4535 - RNA, 21 nt, Artificial Sequence
  Description of Artificial Sequence: Synthetic oligonucleotide
cucugaagaaguaguggaaaa

SEQ ID NO: 4536 - RNA, 21 nt, Artificial Sequence
  Description of Artificial Sequence: Synthetic oligonucleotide
gugguaguguugguuuuaaca

SEQ ID NO: 4537 - RNA, 21 nt, Artificial Sequence
  Description of Artificial Sequence: Synthetic oligonucleotide
accaccuuguagguuuguuac

SEQ ID NO: 4538 - DNA, 23 bp, Artificial Sequence
  Description of Artificial Sequence: Synthetic oligonucleotide
  Description of Combined DNA/RNA Molecule: Synthetic oligonucleotide
uaccaguguguguacacaacatt

SEQ ID NO: 4539 - DNA, 23 bp, Artificial Sequence
  Description of Artificial Sequence: Synthetic oligonucleotide
  Description of Combined DNA/RNA Molecule: Synthetic oligonucleotide
acaacuacagccauaaccuuutt

SEQ ID NO: 4540 - RNA, 21 nt, Artificial Sequence
  Description of Artificial Sequence: Synthetic oligonucleotide
uuaaacggguuugcgguguaa

SEQ ID NO: 4541 - DNA, 23 bp, Artificial Sequence
  Description of Artificial Sequence: Synthetic oligonucleotide
  Description of Combined DNA/RNA Molecule: Synthetic oligonucleotide
uaagacgggcugcacuuacactt

SEQ ID NO: 4542 - RNA, 21 nt, Artificial Sequence
  Description of Artificial Sequence: Synthetic oligonucleotide
acaugguaccacauauaucac

SEQ ID NO: 4543 - RNA, 21 nt, Artificial Sequence
  Description of Artificial Sequence: Synthetic oligonucleotide
ucaaacugucaaacccgguaa

SEQ ID NO: 4544 - DNA, 23 bp, Artificial Sequence
  Description of Artificial Sequence: Synthetic oligonucleotide
  Description of Combined DNA/RNA Molecule: Synthetic oligonucleotide
ugagcaaagaagaaguguuuutt

SEQ ID NO: 4545 - RNA, 21 nt, Artificial Sequence
  Description of Artificial Sequence: Synthetic oligonucleotide
uugauuguuacgaugguggcu

SEQ ID NO: 4546 - RNA, 21 nt, Artificial Sequence
  Description of Artificial Sequence: Synthetic oligonucleotide
aaaugaaucuuaaguaugcca

SEQ ID NO: 4547 - RNA, 21 nt, Artificial Sequence
  Description of Artificial Sequence: Synthetic oligonucleotide
uaugccauuagugcaaagaau

SEQ ID NO: 4548 - RNA, 21 nt, Artificial Sequence
  Description of Artificial Sequence: Synthetic oligonucleotide
ugccauuagugcaaagaauag

SEQ ID NO: 4549 - RNA, 21 nt, Artificial Sequence
  Description of Artificial Sequence: Synthetic oligonucleotide
agaauagagcucgcaccguag

SEQ ID NO: 4550 - DNA, 23 bp, Artificial Sequence
  Description of Artificial Sequence: Synthetic oligonucleotide
  Description of Combined DNA/RNA Molecule: Synthetic oligonucleotide
cagcuacggugcgagcucuautt

SEQ ID NO: 4551 - RNA, 21 nt, Artificial Sequence
  Description of Artificial Sequence: Synthetic oligonucleotide
ucgcaccguagcuggugucuc

SEQ ID NO: 4552 - RNA, 21 nt, Artificial Sequence
  Description of Artificial Sequence: Synthetic oligonucleotide
aacugcuuaugcuaauagugu

SEQ ID NO: 4553 - RNA, 21 nt, Artificial Sequence
  Description of Artificial Sequence: Synthetic oligonucleotide
gacugagacugaccuuacuaa

SEQ ID NO: 4554 - RNA, 21 nt, Artificial Sequence
  Description of Artificial Sequence: Synthetic oligonucleotide
gaguacaccuuugaaaaaggu

SEQ ID NO: 4555 - RNA, 21 nt, Artificial Sequence
  Description of Artificial Sequence: Synthetic oligonucleotide
ugguacugguaagagucauuu

SEQ ID NO: 4556 - RNA, 21 nt, Artificial Sequence
  Description of Artificial Sequence: Synthetic oligonucleotide
ucugcuaaucuugcugcuacu

SEQ ID NO: 4557 - RNA, 21 nt, Artificial Sequence
  Description of Artificial Sequence: Synthetic oligonucleotide
guacguuaauaguuaauagcg

SEQ ID NO: 4558 - RNA, 21 nt, Artificial Sequence
  Description of Artificial Sequence: Synthetic oligonucleotide
uucuugcuuucgugguauucu

SEQ ID NO: 4559 - RNA, 21 nt, Artificial Sequence
  Description of Artificial Sequence: Synthetic oligonucleotide
cuuacugcgcuucgauugugu

SEQ ID NO: 4560 - RNA, 21 nt, Artificial Sequence
  Description of Artificial Sequence: Synthetic oligonucleotide
cgcuucgauugugugcguacu

SEQ ID NO: 4561 - RNA, 21 nt, Artificial Sequence
  Description of Artificial Sequence: Synthetic oligonucleotide
cguacugcugcaauauuguua

SEQ ID NO: 4562 - DNA, 23 bp, Artificial Sequence
  Description of Artificial Sequence: Synthetic oligonucleotide
  Description of Combined DNA/RNA Molecule: Synthetic oligonucleotide
ucguuuagaccagaagaucagtt

SEQ ID NO: 4563 - DNA, 23 bp, Artificial Sequence
  Description of Artificial Sequence: Synthetic oligonucleotide
  Description of Combined DNA/RNA Molecule: Synthetic oligonucleotide
guaauaagaaagcguucgugatt

SEQ ID NO: 4564 - DNA, 23 bp, Artificial Sequence
  Description of Artificial Sequence: Synthetic oligonucleotide
  Description of Combined DNA/RNA Molecule: Synthetic oligonucleotide
aauaauuuucauguucguuuatt

SEQ ID NO: 4565 - DNA, 23 bp, Artificial Sequence
  Description of Artificial Sequence: Synthetic oligonucleotide
  Description of Combined DNA/RNA Molecule: Synthetic oligonucleotide
aagcacaaauagaagucaauutt

SEQ ID NO: 4566 - DNA, 23 bp, Artificial Sequence
  Description of Artificial Sequence: Synthetic oligonucleotide
  Description of Combined DNA/RNA Molecule: Synthetic oligonucleotide
aaccaagacgcaguauuauugtt

SEQ ID NO: 4567 - RNA, 21 nt, Artificial Sequence
  Description of Artificial Sequence: Synthetic oligonucleotide
auuggcuacuaccgaagagcu

SEQ ID NO: 4568 - RNA, 21 nt, Artificial Sequence
  Description of Artificial Sequence: Synthetic oligonucleotide
cgugcuacaacuuccucaagg

SEQ ID NO: 4569 - RNA, 21 nt, Artificial Sequence
  Description of Artificial Sequence: Synthetic oligonucleotide
gauugaaccagcuugagagca

SEQ ID NO: 4570 - RNA, 21 nt, Artificial Sequence
  Description of Artificial Sequence: Synthetic oligonucleotide
ugguaaaggccaacaacaaca

SEQ ID NO: 4571 - DNA, 23 bp, Artificial Sequence
  Description of Artificial Sequence: Synthetic oligonucleotide
  Description of Combined DNA/RNA Molecule: Synthetic oligonucleotide
gccucagcagcagauuucuuatt

SEQ ID NO: 4572 - RNA, 21 nt, Artificial Sequence
  Description of Artificial Sequence: Synthetic oligonucleotide
agacaaggaacugauuacaaa

SEQ ID NO: 4573 - RNA, 21 nt, Artificial Sequence
  Description of Artificial Sequence: Synthetic oligonucleotide
aaauuggaugacaaagaucca

SEQ ID NO: 4574 - RNA, 21 nt, Artificial Sequence
  Description of Artificial Sequence: Synthetic oligonucleotide
caccaacagagccuaaaaagg

SEQ ID NO: 4575 - DNA, 23 bp, Artificial Sequence
  Description of Artificial Sequence: Synthetic oligonucleotide
  Description of Combined DNA/RNA Molecule: Synthetic oligonucleotide
auucauucugcacaagaguagtt

SEQ ID NO: 4576 - DNA, 23 bp, Artificial Sequence
  Description of Artificial Sequence: Synthetic oligonucleotide
  Description of Combined DNA/RNA Molecule: Synthetic oligonucleotide
ucgaucguacuccgcguggcctt

SEQ ID NO: 4577 - DNA, 23 bp, Artificial Sequence
  Description of Artificial Sequence: Synthetic oligonucleotide
  Description of Combined DNA/RNA Molecule: Synthetic oligonucleotide
uuuuacacauuagggcucuuctt

SEQ ID NO: 4578 - RNA, 21 nt, Artificial Sequence
  Description of Artificial Sequence: Synthetic oligonucleotide
agacaaggaacugauuacaaa

SEQ ID NO: 4579 - RNA, 21 nt, Artificial Sequence
  Description of Artificial Sequence: Synthetic oligonucleotide
aacugcuuaugcuaauagugu

SEQ ID NO: 4580 - RNA, 21 nt, Artificial Sequence
  Description of Artificial Sequence: Synthetic oligonucleotide
uucuugcuuucgugguauucu

SEQ ID NO: 4581 - RNA, 21 nt, Artificial Sequence
  Description of Artificial Sequence: Synthetic oligonucleotide
cuacucuugugcagaaugaau

SEQ ID NO: 4582 - DNA, 21 bp, Artificial Sequence
  Description of Artificial Sequence: Synthetic oligonucleotide
  Description of Combined DNA/RNA Molecule: Synthetic oligonucleotide
uugaaggugucucuguuugtt

SEQ ID NO: 4583 - DNA, 21 bp, Artificial Sequence
  Description of Artificial Sequence: Synthetic oligonucleotide
  Description of Combined DNA/RNA Molecule: Synthetic oligonucleotide
aagucaacaccauuaacaatt

SEQ ID NO: 4584 - DNA, 21 bp, Artificial Sequence
  Description of Artificial Sequence: Synthetic oligonucleotide
  Description of Combined DNA/RNA Molecule: Synthetic oligonucleotide
ucaacuguugcaaaaguaatt

SEQ ID NO: 4585 - DNA, 21 bp, Artificial Sequence
  Description of Artificial Sequence: Synthetic oligonucleotide
  Description of Combined DNA/RNA Molecule: Synthetic oligonucleotide
ucauaacaaacaccagcautt

SEQ ID NO: 4586 - DNA, 21 bp, Artificial Sequence
  Description of Artificial Sequence: Synthetic oligonucleotide
  Description of Combined DNA/RNA Molecule: Synthetic oligonucleotide
guaguugcaucaccagaagtt

SEQ ID NO: 4587 - DNA, 21 bp, Artificial Sequence
  Description of Artificial Sequence: Synthetic oligonucleotide
  Description of Combined DNA/RNA Molecule: Synthetic oligonucleotide
ugcucacagcacacuaugctt

SEQ ID NO: 4588 - DNA, 21 bp, Artificial Sequence
  Description of Artificial Sequence: Synthetic oligonucleotide
  Description of Combined DNA/RNA Molecule: Synthetic oligonucleotide
agaugcggugauuguuuactt

SEQ ID NO: 4589 - DNA, 21 bp, Artificial Sequence
  Description of Artificial Sequence: Synthetic oligonucleotide
  Description of Combined DNA/RNA Molecule: Synthetic oligonucleotide
aucuacuuucucaaacacatt

SEQ ID NO: 4590 - DNA, 21 bp, Artificial Sequence
  Description of Artificial Sequence: Synthetic oligonucleotide
  Description of Combined DNA/RNA Molecule: Synthetic oligonucleotide
uuuaauguuagugaugcuutt

SEQ ID NO: 4591 - DNA, 21 bp, Artificial Sequence
  Description of Artificial Sequence: Synthetic oligonucleotide
  Description of Combined DNA/RNA Molecule: Synthetic oligonucleotide
acuaaacuuccuuauuacgtt

SEQ ID NO: 4592 - DNA, 23 bp, Artificial Sequence
  Description of Artificial Sequence: Synthetic oligonucleotide
  Description of Combined DNA/RNA Molecule: Synthetic oligonucleotide
uuuguaaucaguuccuugucutt

SEQ ID NO: 4593 - DNA, 21 bp, Artificial Sequence
  Description of Artificial Sequence: Synthetic oligonucleotide
  Description of Combined DNA/RNA Molecule: Synthetic oligonucleotide
cuuacugcgcuucgauugutt

SEQ ID NO: 4594 - DNA, 23 bp, Artificial Sequence
  Description of Artificial Sequence: Synthetic oligonucleotide
  Description of Combined DNA/RNA Molecule: Synthetic oligonucleotide
acacuauuagcauaagcaguutt

SEQ ID NO: 4595 - DNA, 23 bp, Artificial Sequence
  Description of Artificial Sequence: Synthetic oligonucleotide
  Description of Combined DNA/RNA Molecule: Synthetic oligonucleotide
agaauaccacgaaagcaagaatt

SEQ ID NO: 4596 - DNA, 23 bp, Artificial Sequence
  Description of Artificial Sequence: Synthetic oligonucleotide
  Description of Combined DNA/RNA Molecule: Synthetic oligonucleotide
acacaaucgaagcgcaguaagtt

SEQ ID NO: 4597 - DNA, 23 bp, Artificial Sequence
  Description of Artificial Sequence: Synthetic oligonucleotide
  Description of Combined DNA/RNA Molecule: Synthetic oligonucleotide
cuacucuugugcagaaugaautt

SEQ ID NO: 4598 - DNA, 21 bp, Artificial Sequence
  Description of Artificial Sequence: Synthetic oligonucleotide
  Description of Combined DNA/RNA Molecule: Synthetic oligonucleotide
uuucucaacuaaacuuccutt

SEQ ID NO: 4599 - RNA, 21 nt, Artificial Sequence
  Description of Artificial Sequence: Synthetic oligonucleotide
agacaaggaacugauuacaaa

SEQ ID NO: 4600 - RNA, 21 nt, Artificial Sequence
  Description of Artificial Sequence: Synthetic oligonucleotide
agacaaggaacugauuacaaa

SEQ ID NO: 4601 - RNA, 21 nt, Artificial Sequence
  Description of Artificial Sequence: Synthetic oligonucleotide
agacaaggaacugauuacaaa

SEQ ID NO: 4602 - RNA, 21 nt, Artificial Sequence
  Description of Artificial Sequence: Synthetic oligonucleotide
cuacucuugugcagaaugaau

SEQ ID NO: 4603 - RNA, 21 nt, Artificial Sequence
  Description of Artificial Sequence: Synthetic oligonucleotide
cuacucuugugcagaaugaau

SEQ ID NO: 4604 - RNA, 21 nt, Artificial Sequence
  Description of Artificial Sequence: Synthetic oligonucleotide
cuacucuugugcagaaugaau

SEQ ID NO: 4605 - DNA, 21 bp, Artificial Sequence
  Description of Artificial Sequence: Synthetic oligonucleotide
  Description of Combined DNA/RNA Molecule: Synthetic oligonucleotide
guugaguguaauuaggagctt

SEQ ID NO: 4606 - DNA, 21 bp, Artificial Sequence
  Description of Artificial Sequence: Synthetic oligonucleotide
  Description of Combined DNA/RNA Molecule: Synthetic oligonucleotide
uaaauugccuuccucaucctt

SEQ ID NO: 4607 - DNA, 21 bp, Artificial Sequence
  Description of Artificial Sequence: Synthetic oligonucleotide
  Description of Combined DNA/RNA Molecule: Synthetic oligonucleotide
ugcaguugcucuccugcggtt

SEQ ID NO: 4608 - DNA, 21 bp, Artificial Sequence
  Description of Artificial Sequence: Synthetic oligonucleotide
  Description of Combined DNA/RNA Molecule: Synthetic oligonucleotide
gcccauaucguuucauagctt

SEQ ID NO: 4609 - DNA, 21 bp, Artificial Sequence
  Description of Artificial Sequence: Synthetic oligonucleotide
  Description of Combined DNA/RNA Molecule: Synthetic oligonucleotide
caggaugguaaugcugcuatt

SEQ ID NO: 4610 - DNA, 21 bp, Artificial Sequence
  Description of Artificial Sequence: Synthetic oligonucleotide
  Description of Combined DNA/RNA Molecule: Synthetic oligonucleotide
uacgguuucguccguguugtt

SEQ ID NO: 4611 - DNA, 21 bp, Artificial Sequence
  Description of Artificial Sequence: Synthetic oligonucleotide
  Description of Combined DNA/RNA Molecule: Synthetic oligonucleotide
gcaaacugaguuggacgugtt

SEQ ID NO: 4612 - DNA, 21 bp, Artificial Sequence
  Description of Artificial Sequence: Synthetic oligonucleotide
  Description of Combined DNA/RNA Molecule: Synthetic oligonucleotide
gaacacauagggcuguucatt

SEQ ID NO: 4613 - DNA, 21 bp, Artificial Sequence
  Description of Artificial Sequence: Synthetic oligonucleotide
  Description of Combined DNA/RNA Molecule: Synthetic oligonucleotide
ggaucagugccaagcucgutt

SEQ ID NO: 4614 - DNA, 21 bp, Artificial Sequence
  Description of Artificial Sequence: Synthetic oligonucleotide
  Description of Combined DNA/RNA Molecule: Synthetic oligonucleotide
aaccaacacuaccacaugatt

SEQ ID NO: 4615 - DNA, 21 bp, Artificial Sequence
  Description of Artificial Sequence: Synthetic oligonucleotide
  Description of Combined DNA/RNA Molecule: Synthetic oligonucleotide
gcauuguugauaauguugutt

SEQ ID NO: 4616 - DNA, 21 bp, Artificial Sequence
  Description of Artificial Sequence: Synthetic oligonucleotide
  Description of Combined DNA/RNA Molecule: Synthetic oligonucleotide
ggaaccaccuuguagguuutt

SEQ ID NO: 4617 - DNA, 21 bp, Artificial Sequence
  Description of Artificial Sequence: Synthetic oligonucleotide
  Description of Combined DNA/RNA Molecule: Synthetic oligonucleotide
gcaaacccguuuaaaaacgtt

SEQ ID NO: 4618 - DNA, 21 bp, Artificial Sequence
  Description of Artificial Sequence: Synthetic oligonucleotide
  Description of Combined DNA/RNA Molecule: Synthetic oligonucleotide
gucuuacaccgugcggcactt

SEQ ID NO: 4619 - DNA, 21 bp, Artificial Sequence
  Description of Artificial Sequence: Synthetic oligonucleotide
  Description of Combined DNA/RNA Molecule: Synthetic oligonucleotide
uaccacauauaucacgucatt

SEQ ID NO: 4620 - DNA, 21 bp, Artificial Sequence
  Description of Artificial Sequence: Synthetic oligonucleotide
  Description of Combined DNA/RNA Molecule: Synthetic oligonucleotide
gcuauguaaguuuacaucctt

SEQ ID NO: 4621 - DNA, 21 bp, Artificial Sequence
  Description of Artificial Sequence: Synthetic oligonucleotide
  Description of Combined DNA/RNA Molecule: Synthetic oligonucleotide
ucaaacugucaaacccggutt

SEQ ID NO: 4622 - DNA, 21 bp, Artificial Sequence
  Description of Artificial Sequence: Synthetic oligonucleotide
  Description of Combined DNA/RNA Molecule: Synthetic oligonucleotide
aaaauuaccggguuugacatt

SEQ ID NO: 4623 - DNA, 21 bp, Artificial Sequence
  Description of Artificial Sequence: Synthetic oligonucleotide
  Description of Combined DNA/RNA Molecule: Synthetic oligonucleotide
ugcacuaauggcauacuuatt

SEQ ID NO: 4624 - DNA, 21 bp, Artificial Sequence
  Description of Artificial Sequence: Synthetic oligonucleotide
  Description of Combined DNA/RNA Molecule: Synthetic oligonucleotide
auucuuugcacuaauggcatt

SEQ ID NO: 4625 - DNA, 21 bp, Artificial Sequence
  Description of Artificial Sequence: Synthetic oligonucleotide
  Description of Combined DNA/RNA Molecule: Synthetic oligonucleotide
ugcaaagaauagagcucgctt

SEQ ID NO: 4626 - DNA, 21 bp, Artificial Sequence
  Description of Artificial Sequence: Synthetic oligonucleotide
  Description of Combined DNA/RNA Molecule: Synthetic oligonucleotide
ucgcaccguagcugguguctt

SEQ ID NO: 4627 - DNA, 21 bp, Artificial Sequence
  Description of Artificial Sequence: Synthetic oligonucleotide
  Description of Combined DNA/RNA Molecule: Synthetic oligonucleotide
ccucuaguggcggcuauugtt

SEQ ID NO: 4628 - DNA, 21 bp, Artificial Sequence
  Description of Artificial Sequence: Synthetic oligonucleotide
  Description of Combined DNA/RNA Molecule: Synthetic oligonucleotide
cacuauuagcauaagcagutt

SEQ ID NO: 4629 - DNA, 21 bp, Artificial Sequence
  Description of Artificial Sequence: Synthetic oligonucleotide
  Description of Combined DNA/RNA Molecule: Synthetic oligonucleotide
aucaggaguaugcugaugutt

SEQ ID NO: 4630 - DNA, 21 bp, Artificial Sequence
  Description of Artificial Sequence: Synthetic oligonucleotide
  Description of Combined DNA/RNA Molecule: Synthetic oligonucleotide
uaauagcucauaccuccuatt

SEQ ID NO: 4631 - DNA, 21 bp, Artificial Sequence
  Description of Artificial Sequence: Synthetic oligonucleotide
  Description of Combined DNA/RNA Molecule: Synthetic oligonucleotide
acaacagcaucaccauagutt

SEQ ID NO: 4632 - DNA, 21 bp, Artificial Sequence
  Description of Artificial Sequence: Synthetic oligonucleotide
  Description of Combined DNA/RNA Molecule: Synthetic oligonucleotide
ugccacaagagcacuaugutt

SEQ ID NO: 4633 - DNA, 21 bp, Artificial Sequence
  Description of Artificial Sequence: Synthetic oligonucleotide
  Description of Combined DNA/RNA Molecule: Synthetic oligonucleotide
ucugcucgcauaguguauatt

SEQ ID NO: 4634 - DNA, 21 bp, Artificial Sequence
  Description of Artificial Sequence: Synthetic oligonucleotide
  Description of Combined DNA/RNA Molecule: Synthetic oligonucleotide
guugaauucacuuugaauutt

SEQ ID NO: 4635 - DNA, 21 bp, Artificial Sequence
  Description of Artificial Sequence: Synthetic oligonucleotide
  Description of Combined DNA/RNA Molecule: Synthetic oligonucleotide
uagguccagacauguuccutt

SEQ ID NO: 4636 - DNA, 21 bp, Artificial Sequence
  Description of Artificial Sequence: Synthetic oligonucleotide
  Description of Combined DNA/RNA Molecule: Synthetic oligonucleotide
uaugacuaugucauauucatt

SEQ ID NO: 4637 - DNA, 21 bp, Artificial Sequence
  Description of Artificial Sequence: Synthetic oligonucleotide
  Description of Combined DNA/RNA Molecule: Synthetic oligonucleotide
gcuuagcccaaagcucaaatt

SEQ ID NO: 4638 - DNA, 21 bp, Artificial Sequence
  Description of Artificial Sequence: Synthetic oligonucleotide
  Description of Combined DNA/RNA Molecule: Synthetic oligonucleotide
uuugcgacauucaucauuatt

SEQ ID NO: 4639 - DNA, 21 bp, Artificial Sequence
  Description of Artificial Sequence: Synthetic oligonucleotide
  Description of Combined DNA/RNA Molecule: Synthetic oligonucleotide
aguacauaaguucguacuctt

SEQ ID NO: 4640 - DNA, 21 bp, Artificial Sequence
  Description of Artificial Sequence: Synthetic oligonucleotide
  Description of Combined DNA/RNA Molecule: Synthetic oligonucleotide
uauuaacuauuaacguacctt

SEQ ID NO: 4641 - DNA, 21 bp, Artificial Sequence
  Description of Artificial Sequence: Synthetic oligonucleotide
  Description of Combined DNA/RNA Molecule: Synthetic oligonucleotide
aauagcguacuucuuuuuctt

SEQ ID NO: 4642 - DNA, 21 bp, Artificial Sequence
  Description of Artificial Sequence: Synthetic oligonucleotide
  Description of Combined DNA/RNA Molecule: Synthetic oligonucleotide
gcuuucgugguauucuugctt

SEQ ID NO: 4643 - DNA, 21 bp, Artificial Sequence
  Description of Artificial Sequence: Synthetic oligonucleotide
  Description of Combined DNA/RNA Molecule: Synthetic oligonucleotide
cuuacugcgcuucgauugutt

SEQ ID NO: 4644 - DNA, 21 bp, Artificial Sequence
  Description of Artificial Sequence: Synthetic oligonucleotide
  Description of Combined DNA/RNA Molecule: Synthetic oligonucleotide
uaguucguuuagaccagaatt

SEQ ID NO: 4645 - DNA, 21 bp, Artificial Sequence
  Description of Artificial Sequence: Synthetic oligonucleotide
  Description of Combined DNA/RNA Molecule: Synthetic oligonucleotide
cacgaacgcuuucuuauuatt

SEQ ID NO: 4646 - DNA, 21 bp, Artificial Sequence
  Description of Artificial Sequence: Synthetic oligonucleotide
  Description of Combined DNA/RNA Molecule: Synthetic oligonucleotide
ucagguuuugcugcauacatt

SEQ ID NO: 4647 - DNA, 21 bp, Artificial Sequence
  Description of Artificial Sequence: Synthetic oligonucleotide
  Description of Combined DNA/RNA Molecule: Synthetic oligonucleotide
caguaagugacaacagaugtt

SEQ ID NO: 4648 - DNA, 21 bp, Artificial Sequence
  Description of Artificial Sequence: Synthetic oligonucleotide
  Description of Combined DNA/RNA Molecule: Synthetic oligonucleotide
gacgcaguauuauuggguatt

SEQ ID NO: 4649 - DNA, 21 bp, Artificial Sequence
  Description of Artificial Sequence: Synthetic oligonucleotide
  Description of Combined DNA/RNA Molecule: Synthetic oligonucleotide
aaauuggcuacuaccgaagtt

SEQ ID NO: 4650 - DNA, 21 bp, Artificial Sequence
  Description of Artificial Sequence: Synthetic oligonucleotide
  Description of Combined DNA/RNA Molecule: Synthetic oligonucleotide
ucugcguagaagccuuuugtt

SEQ ID NO: 4651 - DNA, 21 bp, Artificial Sequence
  Description of Artificial Sequence: Synthetic oligonucleotide
  Description of Combined DNA/RNA Molecule: Synthetic oligonucleotide
agcagauuucuuagugacatt

SEQ ID NO: 4652 - DNA, 21 bp, Artificial Sequence
  Description of Artificial Sequence: Synthetic oligonucleotide
  Description of Combined DNA/RNA Molecule: Synthetic oligonucleotide
uuguaaucaguuccuuguctt

SEQ ID NO: 4653 - DNA, 21 bp, Artificial Sequence
  Description of Artificial Sequence: Synthetic oligonucleotide
  Description of Combined DNA/RNA Molecule: Synthetic oligonucleotide
cgaaggugugacuuccaugtt

SEQ ID NO: 4654 - DNA, 21 bp, Artificial Sequence
  Description of Artificial Sequence: Synthetic oligonucleotide
  Description of Combined DNA/RNA Molecule: Synthetic oligonucleotide
ucuacucuugugcagaaugtt

SEQ ID NO: 4655 - DNA, 21 bp, Artificial Sequence
  Description of Artificial Sequence: Synthetic oligonucleotide
  Description of Combined DNA/RNA Molecule: Synthetic oligonucleotide
gauuaaagauugcuaugugtt

SEQ ID NO: 4656 - DNA, 21 bp, Artificial Sequence
  Description of Artificial Sequence: Synthetic oligonucleotide
  Description of Combined DNA/RNA Molecule: Synthetic oligonucleotide
ugaaagagccaccacauuutt

SEQ ID NO: 4657 - DNA, 21 bp, Artificial Sequence
  Description of Artificial Sequence: Synthetic oligonucleotide
  Description of Combined DNA/RNA Molecule: Synthetic oligonucleotide
aagagcccuaauguguaaatt

SEQ ID NO: 4658 - DNA, 23 bp, Artificial Sequence
  Description of Artificial Sequence: Synthetic oligonucleotide
  Description of Combined DNA/RNA Molecule: Synthetic oligonucleotide
ugcaacacggacgaaaccguatt

SEQ ID NO: 4659 - RNA, 21 nt, Artificial Sequence
  Description of Artificial Sequence: Synthetic oligonucleotide
aaacacacguccaacucaguu

SEQ ID NO: 4660 - DNA, 23 bp, Artificial Sequence
  Description of Artificial Sequence: Synthetic oligonucleotide
  Description of Combined DNA/RNA Molecule: Synthetic oligonucleotide
augaacacauagggcuguucatt

SEQ ID NO: 4661 - DNA, 23 bp, Artificial Sequence
  Description of Artificial Sequence: Synthetic oligonucleotide
  Description of Combined DNA/RNA Molecule: Synthetic oligonucleotide
auugucaguaaguuuuaaauatt

SEQ ID NO: 4662 - RNA, 21 nt, Artificial Sequence
  Description of Artificial Sequence: Synthetic oligonucleotide
cucugaagaaguaguggaaaa

SEQ ID NO: 4663 - RNA, 21 nt, Artificial Sequence
  Description of Artificial Sequence: Synthetic oligonucleotide
gugguaguguugguuuuaaca

SEQ ID NO: 4664 - RNA, 21 nt, Artificial Sequence
  Description of Artificial Sequence: Synthetic oligonucleotide
accaccuuguagguuuguuac

SEQ ID NO: 4665 - DNA, 23 bp, Artificial Sequence
  Description of Artificial Sequence: Synthetic oligonucleotide
  Description of Combined DNA/RNA Molecule: Synthetic oligonucleotide
uaccaguguguguacacaacatt

SEQ ID NO: 4666 - DNA, 23 bp, Artificial Sequence
  Description of Artificial Sequence: Synthetic oligonucleotide
  Description of Combined DNA/RNA Molecule: Synthetic oligonucleotide
acaacuacagccauaaccuuutt

SEQ ID NO: 4667 - RNA, 21 nt, Artificial Sequence
  Description of Artificial Sequence: Synthetic oligonucleotide
uuaaacggguuugcgguguaa

SEQ ID NO: 4668 - DNA, 23 bp, Artificial Sequence
  Description of Artificial Sequence: Synthetic oligonucleotide
  Description of Combined DNA/RNA Molecule: Synthetic oligonucleotide
uaagacgggcugcacuuacactt

SEQ ID NO: 4669 - DNA, 23 bp, Artificial Sequence
  Description of Artificial Sequence: Synthetic oligonucleotide
  Description of Combined DNA/RNA Molecule: Synthetic oligonucleotide
gugauauaugugguaccaugutt

SEQ ID NO: 4670 - RNA, 21 nt, Artificial Sequence
  Description of Artificial Sequence: Synthetic oligonucleotide
ucaaacugucaaacccgguaa

SEQ ID NO: 4671 - RNA, 21 nt, Artificial Sequence
  Description of Artificial Sequence: Synthetic oligonucleotide
aaaacacuucuucuuugcuca

SEQ ID NO: 4672 - RNA, 21 nt, Artificial Sequence
  Description of Artificial Sequence: Synthetic oligonucleotide
uugauuguuacgaugguggcu

SEQ ID NO: 4673 - DNA, 23 bp, Artificial Sequence
  Description of Artificial Sequence: Synthetic oligonucleotide
  Description of Combined DNA/RNA Molecule: Synthetic oligonucleotide
uggcauacuuaagauucauuutt

SEQ ID NO: 4674 - RNA, 21 nt, Artificial Sequence
  Description of Artificial Sequence: Synthetic oligonucleotide
uaugccauuagugcaaagaau

SEQ ID NO: 4675 - RNA, 21 nt, Artificial Sequence
  Description of Artificial Sequence: Synthetic oligonucleotide
ugccauuagugcaaagaauag

SEQ ID NO: 4676 - RNA, 21 nt, Artificial Sequence
  Description of Artificial Sequence: Synthetic oligonucleotide
agaauagagcucgcaccguag

SEQ ID NO: 4677 - DNA, 23 bp, Artificial Sequence
  Description of Artificial Sequence: Synthetic oligonucleotide
  Description of Combined DNA/RNA Molecule: Synthetic oligonucleotide
cagcuacggugcgagcucuautt

SEQ ID NO: 4678 - DNA, 23 bp, Artificial Sequence
  Description of Artificial Sequence: Synthetic oligonucleotide
  Description of Combined DNA/RNA Molecule: Synthetic oligonucleotide
gagacaccagcuacggugcgatt

SEQ ID NO: 4679 - DNA, 23 bp, Artificial Sequence
  Description of Artificial Sequence: Synthetic oligonucleotide
  Description of Combined DNA/RNA Molecule: Synthetic oligonucleotide
acacuauuagcauaagcaguutt

SEQ ID NO: 4680 - RNA, 21 nt, Artificial Sequence
  Description of Artificial Sequence: Synthetic oligonucleotide
gacugagacugaccuuacuaa

SEQ ID NO: 4681 - RNA, 21 nt, Artificial Sequence
  Description of Artificial Sequence: Synthetic oligonucleotide
gaguacaccuuugaaaaaggu

SEQ ID NO: 4682 - DNA, 23 bp, Artificial Sequence
  Description of Artificial Sequence: Synthetic oligonucleotide
  Description of Combined DNA/RNA Molecule: Synthetic oligonucleotide
aaaugacucuuaccaguaccatt

SEQ ID NO: 4683 - DNA, 23 bp, Artificial Sequence
  Description of Artificial Sequence: Synthetic oligonucleotide
  Description of Combined DNA/RNA Molecule: Synthetic oligonucleotide
aguagcagcaagauuagcagatt

SEQ ID NO: 4684 - RNA, 21 nt, Artificial Sequence
  Description of Artificial Sequence: Synthetic oligonucleotide
guacguuaauaguuaauagcg

SEQ ID NO: 4685 - DNA, 23 bp, Artificial Sequence
  Description of Artificial Sequence: Synthetic oligonucleotide
  Description of Combined DNA/RNA Molecule: Synthetic oligonucleotide
agaauaccacgaaagcaagaatt

SEQ ID NO: 4686 - DNA, 23 bp, Artificial Sequence
  Description of Artificial Sequence: Synthetic oligonucleotide
  Description of Combined DNA/RNA Molecule: Synthetic oligonucleotide
acacaaucgaagcgcaguaagtt

SEQ ID NO: 4687 - DNA, 23 bp, Artificial Sequence
  Description of Artificial Sequence: Synthetic oligonucleotide
  Description of Combined DNA/RNA Molecule: Synthetic oligonucleotide
aguacgcacacaaucgaagcgtt

SEQ ID NO: 4688 - RNA, 21 nt, Artificial Sequence
  Description of Artificial Sequence: Synthetic oligonucleotide
cguacugcugcaauauuguua

SEQ ID NO: 4689 - RNA, 21 nt, Artificial Sequence
  Description of Artificial Sequence: Synthetic oligonucleotide
cugaucuucuggucuaaacga

SEQ ID NO: 4690 - DNA, 23 bp, Artificial Sequence
  Description of Artificial Sequence: Synthetic oligonucleotide
  Description of Combined DNA/RNA Molecule: Synthetic oligonucleotide
guaauaagaaagcguucgugatt

SEQ ID NO: 4691 - DNA, 23 bp, Artificial Sequence
  Description of Artificial Sequence: Synthetic oligonucleotide
  Description of Combined DNA/RNA Molecule: Synthetic oligonucleotide
aauaauuuucauguucguuuatt

SEQ ID NO: 4692 - DNA, 23 bp, Artificial Sequence
  Description of Artificial Sequence: Synthetic oligonucleotide
  Description of Combined DNA/RNA Molecule: Synthetic oligonucleotide
aagcacaaauagaagucaauutt

SEQ ID NO: 4693 - DNA, 23 bp, Artificial Sequence
  Description of Artificial Sequence: Synthetic oligonucleotide
  Description of Combined DNA/RNA Molecule: Synthetic oligonucleotide
aaccaagacgcaguauuauugtt

SEQ ID NO: 4694 - DNA, 23 bp, Artificial Sequence
  Description of Artificial Sequence: Synthetic oligonucleotide
  Description of Combined DNA/RNA Molecule: Synthetic oligonucleotide
agcucuucgguaguagccaautt

SEQ ID NO: 4695 - RNA, 21 nt, Artificial Sequence
  Description of Artificial Sequence: Synthetic oligonucleotide
cgugcuacaacuuccucaagg

SEQ ID NO: 4696 - RNA, 21 nt, Artificial Sequence
  Description of Artificial Sequence: Synthetic oligonucleotide
gauugaaccagcuugagagca

SEQ ID NO: 4697 - DNA, 23 bp, Artificial Sequence
  Description of Artificial Sequence: Synthetic oligonucleotide
  Description of Combined DNA/RNA Molecule: Synthetic oligonucleotide
uguuguuguuggccuuuaccatt

SEQ ID NO: 4698 - RNA, 21 nt, Artificial Sequence
  Description of Artificial Sequence: Synthetic oligonucleotide
uaagaaaucugcugcugaggc

SEQ ID NO: 4699 - RNA, 21 nt, Artificial Sequence
  Description of Artificial Sequence: Synthetic oligonucleotide
agacaaggaacugauuacaaa

SEQ ID NO: 4700 - DNA, 23 bp, Artificial Sequence
  Description of Artificial Sequence: Synthetic oligonucleotide
  Description of Combined DNA/RNA Molecule: Synthetic oligonucleotide
uggaucuuugucauccaauuutt

SEQ ID NO: 4701 - RNA, 21 nt, Artificial Sequence
  Description of Artificial Sequence: Synthetic oligonucleotide
caccaacagagccuaaaaagg

SEQ ID NO: 4702 - DNA, 23 bp, Artificial Sequence
  Description of Artificial Sequence: Synthetic oligonucleotide
  Description of Combined DNA/RNA Molecule: Synthetic oligonucleotide
auucauucugcacaagaguagtt

SEQ ID NO: 4703 - RNA, 21 nt, Artificial Sequence
  Description of Artificial Sequence: Synthetic oligonucleotide
ggccacgcggaguacgaucga

SEQ ID NO: 4704 - RNA, 21 nt, Artificial Sequence
  Description of Artificial Sequence: Synthetic oligonucleotide
gaagagcccuaauguguaaaa

SEQ ID NO: 4705 - DNA, 21 bp, Artificial Sequence
  Description of Artificial Sequence: Synthetic oligonucleotide
  Description of Combined DNA/RNA Molecule: Synthetic oligonucleotide
caacacggacgaaaccguatt

SEQ ID NO: 4706 - DNA, 21 bp, Artificial Sequence
  Description of Artificial Sequence: Synthetic oligonucleotide
  Description of Combined DNA/RNA Molecule: Synthetic oligonucleotide
cacguccaacucaguuugctt

SEQ ID NO: 4707 - DNA, 21 bp, Artificial Sequence
  Description of Artificial Sequence: Synthetic oligonucleotide
  Description of Combined DNA/RNA Molecule: Synthetic oligonucleotide
gaacacauagggcuguucatt

SEQ ID NO: 4708 - DNA, 21 bp, Artificial Sequence
  Description of Artificial Sequence: Synthetic oligonucleotide
  Description of Combined DNA/RNA Molecule: Synthetic oligonucleotide
ggaucagugccaagcucgutt

SEQ ID NO: 4709 - DNA, 21 bp, Artificial Sequence
  Description of Artificial Sequence: Synthetic oligonucleotide
  Description of Combined DNA/RNA Molecule: Synthetic oligonucleotide
aaccaacacuaccacaugatt

SEQ ID NO: 4710 - DNA, 21 bp, Artificial Sequence
  Description of Artificial Sequence: Synthetic oligonucleotide
  Description of Combined DNA/RNA Molecule: Synthetic oligonucleotide
gcauuguugauaauguugutt

SEQ ID NO: 4711 - DNA, 21 bp, Artificial Sequence
  Description of Artificial Sequence: Synthetic oligonucleotide
  Description of Combined DNA/RNA Molecule: Synthetic oligonucleotide
ggaaccaccuuguagguuutt

SEQ ID NO: 4712 - DNA, 21 bp, Artificial Sequence
  Description of Artificial Sequence: Synthetic oligonucleotide
  Description of Combined DNA/RNA Molecule: Synthetic oligonucleotide
gcaaacccguuuaaaaacgtt

SEQ ID NO: 4713 - DNA, 21 bp, Artificial Sequence
  Description of Artificial Sequence: Synthetic oligonucleotide
  Description of Combined DNA/RNA Molecule: Synthetic oligonucleotide
gucuuacaccgugcggcactt

SEQ ID NO: 4714 - DNA, 21 bp, Artificial Sequence
  Description of Artificial Sequence: Synthetic oligonucleotide
  Description of Combined DNA/RNA Molecule: Synthetic oligonucleotide
ugacgugauauaugugguatt

SEQ ID NO: 4715 - DNA, 21 bp, Artificial Sequence
  Description of Artificial Sequence: Synthetic oligonucleotide
  Description of Combined DNA/RNA Molecule: Synthetic oligonucleotide
ggauguaaacuuacauagctt

SEQ ID NO: 4716 - DNA, 21 bp, Artificial Sequence
  Description of Artificial Sequence: Synthetic oligonucleotide
  Description of Combined DNA/RNA Molecule: Synthetic oligonucleotide
ucaaacugucaaacccggutt

SEQ ID NO: 4717 - DNA, 21 bp, Artificial Sequence
  Description of Artificial Sequence: Synthetic oligonucleotide
  Description of Combined DNA/RNA Molecule: Synthetic oligonucleotide
aaaauuaccggguuugacatt

SEQ ID NO: 4718 - DNA, 21 bp, Artificial Sequence
  Description of Artificial Sequence: Synthetic oligonucleotide
  Description of Combined DNA/RNA Molecule: Synthetic oligonucleotide
ugcacuaauggcauacuuatt

SEQ ID NO: 4719 - DNA, 21 bp, Artificial Sequence
  Description of Artificial Sequence: Synthetic oligonucleotide
  Description of Combined DNA/RNA Molecule: Synthetic oligonucleotide
ugccauuagugcaaagaautt

SEQ ID NO: 4720 - DNA, 21 bp, Artificial Sequence
  Description of Artificial Sequence: Synthetic oligonucleotide
  Description of Combined DNA/RNA Molecule: Synthetic oligonucleotide
ugcaaagaauagagcucgctt

SEQ ID NO: 4721 - DNA, 21 bp, Artificial Sequence
  Description of Artificial Sequence: Synthetic oligonucleotide
  Description of Combined DNA/RNA Molecule: Synthetic oligonucleotide
ucgcaccguagcugguguctt

SEQ ID NO: 4722 - DNA, 21 bp, Artificial Sequence
  Description of Artificial Sequence: Synthetic oligonucleotide
  Description of Combined DNA/RNA Molecule: Synthetic oligonucleotide
ccucuaguggcggcuauugtt

SEQ ID NO: 4723 - DNA, 21 bp, Artificial Sequence
  Description of Artificial Sequence: Synthetic oligonucleotide
  Description of Combined DNA/RNA Molecule: Synthetic oligonucleotide
acugcuuaugcuaauagugtt

SEQ ID NO: 4724 - DNA, 21 bp, Artificial Sequence
  Description of Artificial Sequence: Synthetic oligonucleotide
  Description of Combined DNA/RNA Molecule: Synthetic oligonucleotide
acaucagcauacuccugautt

SEQ ID NO: 4725 - DNA, 21 bp, Artificial Sequence
  Description of Artificial Sequence: Synthetic oligonucleotide
  Description of Combined DNA/RNA Molecule: Synthetic oligonucleotide
uaggagguaugagcuauuatt

SEQ ID NO: 4726 - DNA, 21 bp, Artificial Sequence
  Description of Artificial Sequence: Synthetic oligonucleotide
  Description of Combined DNA/RNA Molecule: Synthetic oligonucleotide
acaacagcaucaccauagutt

SEQ ID NO: 4727 - DNA, 21 bp, Artificial Sequence
  Description of Artificial Sequence: Synthetic oligonucleotide
  Description of Combined DNA/RNA Molecule: Synthetic oligonucleotide
acauagugcucuuguggcatt

SEQ ID NO: 4728 - DNA, 21 bp, Artificial Sequence
  Description of Artificial Sequence: Synthetic oligonucleotide
  Description of Combined DNA/RNA Molecule: Synthetic oligonucleotide
ucugcucgcauaguguauatt

SEQ ID NO: 4729 - DNA, 21 bp, Artificial Sequence
  Description of Artificial Sequence: Synthetic oligonucleotide
  Description of Combined DNA/RNA Molecule: Synthetic oligonucleotide
guugaauucacuuugaauutt

SEQ ID NO: 4730 - DNA, 21 bp, Artificial Sequence
  Description of Artificial Sequence: Synthetic oligonucleotide
  Description of Combined DNA/RNA Molecule: Synthetic oligonucleotide
uagguccagacauguuccutt

SEQ ID NO: 4731 - DNA, 21 bp, Artificial Sequence
  Description of Artificial Sequence: Synthetic oligonucleotide
  Description of Combined DNA/RNA Molecule: Synthetic oligonucleotide
uaugacuaugucauauucatt

SEQ ID NO: 4732 - DNA, 21 bp, Artificial Sequence
  Description of Artificial Sequence: Synthetic oligonucleotide
  Description of Combined DNA/RNA Molecule: Synthetic oligonucleotide
gcuuagcccaaagcucaaatt

SEQ ID NO: 4733 - DNA, 21 bp, Artificial Sequence
  Description of Artificial Sequence: Synthetic oligonucleotide
  Description of Combined DNA/RNA Molecule: Synthetic oligonucleotide
uaaugaugaaugucgcaaatt

SEQ ID NO: 4734 - DNA, 21 bp, Artificial Sequence
  Description of Artificial Sequence: Synthetic oligonucleotide
  Description of Combined DNA/RNA Molecule: Synthetic oligonucleotide
aguacauaaguucguacuctt

SEQ ID NO: 4735 - DNA, 21 bp, Artificial Sequence
  Description of Artificial Sequence: Synthetic oligonucleotide
  Description of Combined DNA/RNA Molecule: Synthetic oligonucleotide
uauuaacuauuaacguacctt

SEQ ID NO: 4736 - DNA, 21 bp, Artificial Sequence
  Description of Artificial Sequence: Synthetic oligonucleotide
  Description of Combined DNA/RNA Molecule: Synthetic oligonucleotide
aauagcguacuucuuuuuctt

SEQ ID NO: 4737 - DNA, 21 bp, Artificial Sequence
  Description of Artificial Sequence: Synthetic oligonucleotide
  Description of Combined DNA/RNA Molecule: Synthetic oligonucleotide
gcuuucgugguauucuugctt

SEQ ID NO: 4738 - DNA, 21 bp, Artificial Sequence
  Description of Artificial Sequence: Synthetic oligonucleotide
  Description of Combined DNA/RNA Molecule: Synthetic oligonucleotide
acaaucgaagcgcaguaagtt

SEQ ID NO: 4739 - DNA, 21 bp, Artificial Sequence
  Description of Artificial Sequence: Synthetic oligonucleotide
  Description of Combined DNA/RNA Molecule: Synthetic oligonucleotide
uaguucguuuagaccagaatt

SEQ ID NO: 4740 - DNA, 21 bp, Artificial Sequence
  Description of Artificial Sequence: Synthetic oligonucleotide
  Description of Combined DNA/RNA Molecule: Synthetic oligonucleotide
cacgaacgcuuucuuauuatt

SEQ ID NO: 4741 - DNA, 21 bp, Artificial Sequence
  Description of Artificial Sequence: Synthetic oligonucleotide
  Description of Combined DNA/RNA Molecule: Synthetic oligonucleotide
uguaugcagcaaaaccugatt

SEQ ID NO: 4742 - DNA, 21 bp, Artificial Sequence
  Description of Artificial Sequence: Synthetic oligonucleotide
  Description of Combined DNA/RNA Molecule: Synthetic oligonucleotide
caguaagugacaacagaugtt

SEQ ID NO: 4743 - DNA, 21 bp, Artificial Sequence
  Description of Artificial Sequence: Synthetic oligonucleotide
  Description of Combined DNA/RNA Molecule: Synthetic oligonucleotide
uacccaauaauacugcguctt

SEQ ID NO: 4744 - DNA, 21 bp, Artificial Sequence
  Description of Artificial Sequence: Synthetic oligonucleotide
  Description of Combined DNA/RNA Molecule: Synthetic oligonucleotide
cuucgguaguagccaauuutt

SEQ ID NO: 4745 - DNA, 21 bp, Artificial Sequence
  Description of Artificial Sequence: Synthetic oligonucleotide
  Description of Combined DNA/RNA Molecule: Synthetic oligonucleotide
ucugcguagaagccuuuugtt

SEQ ID NO: 4746 - DNA, 21 bp, Artificial Sequence
  Description of Artificial Sequence: Synthetic oligonucleotide
  Description of Combined DNA/RNA Molecule: Synthetic oligonucleotide
agcagauuucuuagugacatt

SEQ ID NO: 4747 - DNA, 21 bp, Artificial Sequence
  Description of Artificial Sequence: Synthetic oligonucleotide
  Description of Combined DNA/RNA Molecule: Synthetic oligonucleotide
gacaaggaacugauuacaatt

SEQ ID NO: 4748 - DNA, 21 bp, Artificial Sequence
  Description of Artificial Sequence: Synthetic oligonucleotide
  Description of Combined DNA/RNA Molecule: Synthetic oligonucleotide
cgaaggugugacuuccaugtt

SEQ ID NO: 4749 - DNA, 21 bp, Artificial Sequence
  Description of Artificial Sequence: Synthetic oligonucleotide
  Description of Combined DNA/RNA Molecule: Synthetic oligonucleotide
cauucugcacaagaguagatt

SEQ ID NO: 4750 - DNA, 21 bp, Artificial Sequence
  Description of Artificial Sequence: Synthetic oligonucleotide
  Description of Combined DNA/RNA Molecule: Synthetic oligonucleotide
gauuaaagauugcuaugugtt

SEQ ID NO: 4751 - DNA, 21 bp, Artificial Sequence
  Description of Artificial Sequence: Synthetic oligonucleotide
  Description of Combined DNA/RNA Molecule: Synthetic oligonucleotide
aaaugugguggcucuuucatt

SEQ ID NO: 4752 - DNA, 21 bp, Artificial Sequence
  Description of Artificial Sequence: Synthetic oligonucleotide
  Description of Combined DNA/RNA Molecule: Synthetic oligonucleotide
uuuacacauuagggcucuutt

SEQ ID NO: 4753 - RNA, 21 nt, Artificial Sequence
  Description of Artificial Sequence: Synthetic oligonucleotide
uacgguuucguccguguugca

SEQ ID NO: 4754 - DNA, 23 bp, Artificial Sequence
  Description of Artificial Sequence: Synthetic oligonucleotide
  Description of Combined DNA/RNA Molecule: Synthetic oligonucleotide
aacugaguuggacguguguuutt

SEQ ID NO: 4755 - RNA, 21 nt, Artificial Sequence
  Description of Artificial Sequence: Synthetic oligonucleotide
ugaacagcccuauguguucau

SEQ ID NO: 4756 - DNA, 23 bp, Artificial Sequence
  Description of Artificial Sequence: Synthetic oligonucleotide
  Description of Combined DNA/RNA Molecule: Synthetic oligonucleotide
auugucaguaaguuuuaaauatt

SEQ ID NO: 4757 - DNA, 23 bp, Artificial Sequence
  Description of Artificial Sequence: Synthetic oligonucleotide
  Description of Combined DNA/RNA Molecule: Synthetic oligonucleotide
uuuuccacuacuucuucagagtt

SEQ ID NO: 4758 - DNA, 23 bp, Artificial Sequence
  Description of Artificial Sequence: Synthetic oligonucleotide
  Description of Combined DNA/RNA Molecule: Synthetic oligonucleotide
uguuaaaaccaacacuaccactt

SEQ ID NO: 4759 - DNA, 23 bp, Artificial Sequence
  Description of Artificial Sequence: Synthetic oligonucleotide
  Description of Combined DNA/RNA Molecule: Synthetic oligonucleotide
guaacaaaccuacaagguggutt

SEQ ID NO: 4760 - RNA, 21 nt, Artificial Sequence
  Description of Artificial Sequence: Synthetic oligonucleotide
uguuguguacacacacuggua

SEQ ID NO: 4761 - RNA, 21 nt, Artificial Sequence
  Description of Artificial Sequence: Synthetic oligonucleotide
aaagguuauggcuguaguugu

SEQ ID NO: 4762 - DNA, 23 bp, Artificial Sequence
  Description of Artificial Sequence: Synthetic oligonucleotide
  Description of Combined DNA/RNA Molecule: Synthetic oligonucleotide
uuacaccgcaaacccguuuaatt

SEQ ID NO: 4763 - RNA, 21 nt, Artificial Sequence
  Description of Artificial Sequence: Synthetic oligonucleotide
guguaagugcagcccgucuua

SEQ ID NO: 4764 - DNA, 23 bp, Artificial Sequence
  Description of Artificial Sequence: Synthetic oligonucleotide
  Description of Combined DNA/RNA Molecule: Synthetic oligonucleotide
gugauauaugugguaccaugutt

SEQ ID NO: 4765 - DNA, 23 bp, Artificial Sequence
  Description of Artificial Sequence: Synthetic oligonucleotide
  Description of Combined DNA/RNA Molecule: Synthetic oligonucleotide
uuaccggguuugacaguuugatt

SEQ ID NO: 4766 - RNA, 21 nt, Artificial Sequence
  Description of Artificial Sequence: Synthetic oligonucleotide
aaaacacuucuucuuugcuca

SEQ ID NO: 4767 - DNA, 23 bp, Artificial Sequence
  Description of Artificial Sequence: Synthetic oligonucleotide
  Description of Combined DNA/RNA Molecule: Synthetic oligonucleotide
agccaccaucguaacaaucaatt

SEQ ID NO: 4768 - DNA, 23 bp, Artificial Sequence
  Description of Artificial Sequence: Synthetic oligonucleotide
  Description of Combined DNA/RNA Molecule: Synthetic oligonucleotide
uggcauacuuaagauucauuutt

SEQ ID NO: 4769 - DNA, 23 bp, Artificial Sequence
  Description of Artificial Sequence: Synthetic oligonucleotide
  Description of Combined DNA/RNA Molecule: Synthetic oligonucleotide
auucuuugcacuaauggcauatt

SEQ ID NO: 4770 - DNA, 23 bp, Artificial Sequence
  Description of Artificial Sequence: Synthetic oligonucleotide
  Description of Combined DNA/RNA Molecule: Synthetic oligonucleotide
cuauucuuugcacuaauggcatt

SEQ ID NO: 4771 - DNA, 23 bp, Artificial Sequence
  Description of Artificial Sequence: Synthetic oligonucleotide
  Description of Combined DNA/RNA Molecule: Synthetic oligonucleotide
cuacggugcgagcucuauucutt

SEQ ID NO: 4772 - RNA, 21 nt, Artificial Sequence
  Description of Artificial Sequence: Synthetic oligonucleotide
auagagcucgcaccguagcug

SEQ ID NO: 4773 - DNA, 23 bp, Artificial Sequence
  Description of Artificial Sequence: Synthetic oligonucleotide
  Description of Combined DNA/RNA Molecule: Synthetic oligonucleotide
gagacaccagcuacggugcgatt

SEQ ID NO: 4774 - DNA, 23 bp, Artificial Sequence
  Description of Artificial Sequence: Synthetic oligonucleotide
  Description of Combined DNA/RNA Molecule: Synthetic oligonucleotide
acacuauuagcauaagcaguutt

SEQ ID NO: 4775 - DNA, 23 bp, Artificial Sequence
  Description of Artificial Sequence: Synthetic oligonucleotide
  Description of Combined DNA/RNA Molecule: Synthetic oligonucleotide
uuaguaaggucagucucaguctt

SEQ ID NO: 4776 - DNA, 23 bp, Artificial Sequence
  Description of Artificial Sequence: Synthetic oligonucleotide
  Description of Combined DNA/RNA Molecule: Synthetic oligonucleotide
accuuuuucaaagguguacuctt

SEQ ID NO: 4777 - DNA, 23 bp, Artificial Sequence
  Description of Artificial Sequence: Synthetic oligonucleotide
  Description of Combined DNA/RNA Molecule: Synthetic oligonucleotide
aaaugacucuuaccaguaccatt

SEQ ID NO: 4778 - DNA, 23 bp, Artificial Sequence
  Description of Artificial Sequence: Synthetic oligonucleotide
  Description of Combined DNA/RNA Molecule: Synthetic oligonucleotide
aguagcagcaagauuagcagatt

SEQ ID NO: 4779 - DNA, 23 bp, Artificial Sequence
  Description of Artificial Sequence: Synthetic oligonucleotide
  Description of Combined DNA/RNA Molecule: Synthetic oligonucleotide
cgcuauuaacuauuaacguactt

SEQ ID NO: 4780 - DNA, 23 bp, Artificial Sequence
  Description of Artificial Sequence: Synthetic oligonucleotide
  Description of Combined DNA/RNA Molecule: Synthetic oligonucleotide
agaauaccacgaaagcaagaatt

SEQ ID NO: 4781 - DNA, 23 bp, Artificial Sequence
  Description of Artificial Sequence: Synthetic oligonucleotide
  Description of Combined DNA/RNA Molecule: Synthetic oligonucleotide
acacaaucgaagcgcaguaagtt

SEQ ID NO: 4782 - DNA, 23 bp, Artificial Sequence
  Description of Artificial Sequence: Synthetic oligonucleotide
  Description of Combined DNA/RNA Molecule: Synthetic oligonucleotide
aguacgcacacaaucgaagcgtt

SEQ ID NO: 4783 - DNA, 23 bp, Artificial Sequence
  Description of Artificial Sequence: Synthetic oligonucleotide
  Description of Combined DNA/RNA Molecule: Synthetic oligonucleotide
uaacaauauugcagcaguacgtt

SEQ ID NO: 4784 - RNA, 21 nt, Artificial Sequence
  Description of Artificial Sequence: Synthetic oligonucleotide
cugaucuucuggucuaaacga

SEQ ID NO: 4785 - RNA, 21 nt, Artificial Sequence
  Description of Artificial Sequence: Synthetic oligonucleotide
ucacgaacgcuuucuuauuac

SEQ ID NO: 4786 - RNA, 21 nt, Artificial Sequence
  Description of Artificial Sequence: Synthetic oligonucleotide
uaaacgaacaugaaaauuauu

SEQ ID NO: 4787 - RNA, 21 nt, Artificial Sequence
  Description of Artificial Sequence: Synthetic oligonucleotide
aauugacuucuauuugugcuu

SEQ ID NO: 4788 - RNA, 21 nt, Artificial Sequence
  Description of Artificial Sequence: Synthetic oligonucleotide
caauaauacugcgucuugguu

SEQ ID NO: 4789 - DNA, 23 bp, Artificial Sequence
  Description of Artificial Sequence: Synthetic oligonucleotide
  Description of Combined DNA/RNA Molecule: Synthetic oligonucleotide
agcucuucgguaguagccaautt

SEQ ID NO: 4790 - DNA, 23 bp, Artificial Sequence
  Description of Artificial Sequence: Synthetic oligonucleotide
  Description of Combined DNA/RNA Molecule: Synthetic oligonucleotide
ccuugaggaaguuguagcacgtt

SEQ ID NO: 4791 - DNA, 23 bp, Artificial Sequence
  Description of Artificial Sequence: Synthetic oligonucleotide
  Description of Combined DNA/RNA Molecule: Synthetic oligonucleotide
ugcucucaagcugguucaauctt

SEQ ID NO: 4792 - DNA, 23 bp, Artificial Sequence
  Description of Artificial Sequence: Synthetic oligonucleotide
  Description of Combined DNA/RNA Molecule: Synthetic oligonucleotide
uguuguuguuggccuuuaccatt

SEQ ID NO: 4793 - RNA, 21 nt, Artificial Sequence
  Description of Artificial Sequence: Synthetic oligonucleotide
uaagaaaucugcugcugaggc

SEQ ID NO: 4794 - DNA, 23 bp, Artificial Sequence
  Description of Artificial Sequence: Synthetic oligonucleotide
  Description of Combined DNA/RNA Molecule: Synthetic oligonucleotide
uuuguaaucaguuccuugucutt

SEQ ID NO: 4795 - DNA, 23 bp, Artificial Sequence
  Description of Artificial Sequence: Synthetic oligonucleotide
  Description of Combined DNA/RNA Molecule: Synthetic oligonucleotide
uggaucuuugucauccaauuutt

SEQ ID NO: 4796 - DNA, 23 bp, Artificial Sequence
  Description of Artificial Sequence: Synthetic oligonucleotide
  Description of Combined DNA/RNA Molecule: Synthetic oligonucleotide
ccuuuuuaggcucuguuggugtt

SEQ ID NO: 4797 - RNA, 21 nt, Artificial Sequence
  Description of Artificial Sequence: Synthetic oligonucleotide
cuacucuugugcagaaugaau

SEQ ID NO: 4798 - RNA, 21 nt, Artificial Sequence
  Description of Artificial Sequence: Synthetic oligonucleotide
ggccacgcggaguacgaucga

SEQ ID NO: 4799 - RNA, 21 nt, Artificial Sequence
  Description of Artificial Sequence: Synthetic oligonucleotide
gaagagcccuaauguguaaaa

SEQ ID NO: 4800 - DNA, 23 bp, Artificial Sequence
  Description of Artificial Sequence: Synthetic oligonucleotide
  Description of Combined DNA/RNA Molecule: Synthetic oligonucleotide
uuuguaaucaguuccuugucutt

SEQ ID NO: 4801 - DNA, 23 bp, Artificial Sequence
  Description of Artificial Sequence: Synthetic oligonucleotide
  Description of Combined DNA/RNA Molecule: Synthetic oligonucleotide
acacuauuagcauaagcaguutt

SEQ ID NO: 4802 - DNA, 23 bp, Artificial Sequence
  Description of Artificial Sequence: Synthetic oligonucleotide
  Description of Combined DNA/RNA Molecule: Synthetic oligonucleotide
agaauaccacgaaagcaagaatt

SEQ ID NO: 4803 - DNA, 23 bp, Artificial Sequence
  Description of Artificial Sequence: Synthetic oligonucleotide
  Description of Combined DNA/RNA Molecule: Synthetic oligonucleotide
auucauucugcacaagaguagtt

SEQ ID NO: 4804 - DNA, 21 bp, Artificial Sequence
  Description of Artificial Sequence: Synthetic oligonucleotide
  Description of Combined DNA/RNA Molecule: Synthetic oligonucleotide
caaacagagacaccuucaatt

SEQ ID NO: 4805 - DNA, 21 bp, Artificial Sequence
  Description of Artificial Sequence: Synthetic oligonucleotide
  Description of Combined DNA/RNA Molecule: Synthetic oligonucleotide
uuguuaaugguguugacuutt

SEQ ID NO: 4806 - DNA, 21 bp, Artificial Sequence
  Description of Artificial Sequence: Synthetic oligonucleotide
  Description of Combined DNA/RNA Molecule: Synthetic oligonucleotide
uuacuuuugcaacaguugatt

SEQ ID NO: 4807 - DNA, 21 bp, Artificial Sequence
  Description of Artificial Sequence: Synthetic oligonucleotide
  Description of Combined DNA/RNA Molecule: Synthetic oligonucleotide
augcugguguuuguuaugatt

SEQ ID NO: 4808 - DNA, 21 bp, Artificial Sequence
  Description of Artificial Sequence: Synthetic oligonucleotide
  Description of Combined DNA/RNA Molecule: Synthetic oligonucleotide
cuucuggugaugcaacuactt

SEQ ID NO: 4809 - DNA, 21 bp, Artificial Sequence
  Description of Artificial Sequence: Synthetic oligonucleotide
  Description of Combined DNA/RNA Molecule: Synthetic oligonucleotide
gcauagugugcugugagcatt

SEQ ID NO: 4810 - DNA, 21 bp, Artificial Sequence
  Description of Artificial Sequence: Synthetic oligonucleotide
  Description of Combined DNA/RNA Molecule: Synthetic oligonucleotide
guaaacaaucaccgcaucutt

SEQ ID NO: 4811 - DNA, 21 bp, Artificial Sequence
  Description of Artificial Sequence: Synthetic oligonucleotide
  Description of Combined DNA/RNA Molecule: Synthetic oligonucleotide
uguguuugagaaaguagautt

SEQ ID NO: 4812 - DNA, 21 bp, Artificial Sequence
  Description of Artificial Sequence: Synthetic oligonucleotide
  Description of Combined DNA/RNA Molecule: Synthetic oligonucleotide
aagcaucacuaacauuaaatt

SEQ ID NO: 4813 - DNA, 21 bp, Artificial Sequence
  Description of Artificial Sequence: Synthetic oligonucleotide
  Description of Combined DNA/RNA Molecule: Synthetic oligonucleotide
cguaauaaggaaguuuagutt

SEQ ID NO: 4814 - DNA, 23 bp, Artificial Sequence
  Description of Artificial Sequence: Synthetic oligonucleotide
  Description of Combined DNA/RNA Molecule: Synthetic oligonucleotide
agacaaggaacugauuacaaatt

SEQ ID NO: 4815 - DNA, 21 bp, Artificial Sequence
  Description of Artificial Sequence: Synthetic oligonucleotide
  Description of Combined DNA/RNA Molecule: Synthetic oligonucleotide
acaaucgaagcgcaguaagtt

SEQ ID NO: 4816 - DNA, 23 bp, Artificial Sequence
  Description of Artificial Sequence: Synthetic oligonucleotide
  Description of Combined DNA/RNA Molecule: Synthetic oligonucleotide
aacugcuuaugcuaauagugutt

SEQ ID NO: 4817 - DNA, 23 bp, Artificial Sequence
  Description of Artificial Sequence: Synthetic oligonucleotide
  Description of Combined DNA/RNA Molecule: Synthetic oligonucleotide
uucuugcuuucgugguauucutt

SEQ ID NO: 4818 - DNA, 23 bp, Artificial Sequence
  Description of Artificial Sequence: Synthetic oligonucleotide
  Description of Combined DNA/RNA Molecule: Synthetic oligonucleotide
cuuacugcgcuucgauugugutt

SEQ ID NO: 4819 - DNA, 23 bp, Artificial Sequence
  Description of Artificial Sequence: Synthetic oligonucleotide
  Description of Combined DNA/RNA Molecule: Synthetic oligonucleotide
auucauucugcacaagaguagtt

SEQ ID NO: 4820 - DNA, 21 bp, Artificial Sequence
  Description of Artificial Sequence: Synthetic oligonucleotide
  Description of Combined DNA/RNA Molecule: Synthetic oligonucleotide
aggaaguuuaguugagaaatt

SEQ ID NO: 4821 - DNA, 23 bp, Artificial Sequence
  Description of Artificial Sequence: Synthetic oligonucleotide
  Description of Combined DNA/RNA Molecule: Synthetic oligonucleotide
uuuguaaucaguuccuugucutt

SEQ ID NO: 4822 - RNA, 23 nt, Artificial Sequence
  Description of Artificial Sequence: Synthetic oligonucleotide
uuuguaaucaguuccuugucuuu

SEQ ID NO: 4823 - RNA, 23 nt, Artificial Sequence
  Description of Artificial Sequence: Synthetic oligonucleotide
uuuguaaucaguuccuugucuuu

SEQ ID NO: 4824 - DNA, 23 bp, Artificial Sequence
  Description of Artificial Sequence: Synthetic oligonucleotide
  Description of Combined DNA/RNA Molecule: Synthetic oligonucleotide
auucauucugcacaagaguagtt

SEQ ID NO: 4825 - RNA, 23 nt, Artificial Sequence
  Description of Artificial Sequence: Synthetic oligonucleotide
auucauucugcacaagaguaguu

SEQ ID NO: 4826 - RNA, 23 nt, Artificial Sequence
  Description of Artificial Sequence: Synthetic oligonucleotide
auucauucugcacaagaguaguu

SEQ ID NO: 4827 - RNA, 21 nt, Artificial Sequence
  Description of Artificial Sequence: Synthetic oligonucleotide
agacaaggaacugauuacaaa

SEQ ID NO: 4828 - RNA, 21 nt, Artificial Sequence
  Description of Artificial Sequence: Synthetic oligonucleotide
cuacucuugugcagaaugaau

SEQ ID NO: 4829 - RNA, 23 nt, Artificial Sequence
  Description of Artificial Sequence: Synthetic oligonucleotide
uuuguaaucaguuccuugucuuu

SEQ ID NO: 4830 - RNA, 23 nt, Artificial Sequence
  Description of Artificial Sequence: Synthetic oligonucleotide
auucauucugcacaagaguaguu
